(19) United States
(12) Patent Application Publication
(10) Pub. No.: US 2025/0270527 A1
(43) Pub. Date: Aug. 28, 2025

(54) NUCLEOBASE EDITORS AND USES THEREOF

(71) Applicants: David R. Liu, Cambridge, MA (US); Alexis Christine Komor, Cambridge, MA (US); Holly A. Rees, Cambridge, MA (US); Yongjoo Kim, Cambridge, MA (US)

(72) Inventors: David R. Liu, Cambridge, MA (US); Alexis Christine Komor, Cambridge, MA (US); Holly A. Rees, Cambridge, MA (US); Yongjoo Kim, Cambridge, MA (US)

(73) Assignee: President and Fellows of Harvard College, Cambridge, MA (US)

(21) Appl. No.: 19/202,976

(22) Filed: May 8, 2025

Related U.S. Application Data
(63) Continuation of application No. 17/527,011, filed on Nov. 15, 2021, now Pat. No. 12,344,869.
Application No. 17/527,011 is a continuation of application No. 15/960,171, filed on Apr. 23, 2018, now Pat. No. 11,214,780.
Application No. 15/960,171 is a continuation of application No. PCT/US2016/058344, filed on Oct. 22, 2016.
Application No. 15/960,171 is a continuation of application No. 15/331,852, filed on Oct. 22, 2016, now Pat. No. 10,167,457.
(60) Provisional application No. 62/408,686, filed on Oct. 14, 2016.
(60) Provisional application No. 62/398,490, filed on Sep. 22, 2016.
(60) Provisional application No. 62/370,700, filed on Aug. 3, 2016.
(60) Provisional application No. 62/357,352, filed on Jun. 30, 2016.
(60) Provisional application No. 62/357,332, filed on Jun. 30, 2016.
(60) Provisional application No. 62/322,178, filed on Apr. 13, 2016.
(60) Provisional application No. 62/311,763, filed on Mar. 22, 2016.
(60) Provisional application No. 62/279,346, filed on Jan. 15, 2016.
(60) Provisional application No. 62/245,828, filed on Oct. 23, 2015.
(60) Provisional application No. 62/408,686, filed on Oct. 14, 2016.
(60) Provisional application No. 62/398,490, filed on Sep. 22, 2016.
(60) Provisional application No. 62/370,700, filed on Aug. 3, 2016.
(60) Provisional application No. 62/357,352, filed on Jun. 30, 2016.
(60) Provisional application No. 62/357,332, filed on Jun. 30, 2016.
(60) Provisional application No. 62/322,178, filed on Apr. 13, 2016.
(60) Provisional application No. 62/311,763, filed on Mar. 22, 2016.
(60) Provisional application No. 62/279,346, filed on Jan. 15, 2016.
(60) Provisional application No. 62/245,828, filed on Oct. 23, 2015.

(51) Int. Cl. C12N 9/22; C07K 14/32; C12N 9/24; C12N 9/78; C12N 15/11; C12N 15/90

(52) U.S. Cl. CPC C12N 9/22; C07K 14/32; C12N 9/2497; C12N 9/78; C12N 15/11; C12N 15/907; C12Y 305/04005; C07K 2319/00; C07K 2319/09; C07K 2319/80; C12N 2310/20; C12N 2800/80

(57) ABSTRACT

Some aspects of this disclosure provide strategies, systems, reagents, methods, and kits that are useful for the targeted editing of nucleic acids, including editing a single site within the genome of a cell or subject, e.g., within the human genome. In some embodiments, fusion proteins of Cas9 and nucleic acid editing proteins or protein domains, e.g., deaminase domains, are provided. In some embodiments, methods for targeted nucleic acid editing are provided. In some embodiments, reagents and kits for the generation of targeted nucleic acid editing proteins, e.g., fusion proteins of Cas9 and nucleic acid editing proteins or domains, are provided.

### RELATED APPLICATIONS

[0001] This application is a continuation of and claims priority under 35 U.S.C. § 120 to U.S. application Ser. No. 15/960,171, filed Apr. 23, 2018, which is a continuation of and claims priority under 35 U.S.C. § 120 to international PCT Application, PCT/US2016/058344, filed Oct. 22, 2016, and is a continuation of and claims priority under 35 U.S.C. § 120 to U.S. application Ser. No. 15/331,852, filed Oct. 22, 2016, which claims priority under 35 U.S.C. § 119(e) to U.S. provisional patent applications, U.S. Ser. No. 62/245,828 filed Oct. 23, 2015, U.S. Ser. No. 62/279,346 filed Jan. 15, 2016, U.S. Ser. No. 62/311,763 filed Mar. 22, 2016, U.S. Ser. No. 62/322,178 filed Apr. 13, 2016, U.S. Ser. No. 62/357,352 filed Jun. 30, 2016, U.S. Ser. No. 62/370,700 filed Aug. 3, 2016, U.S. Ser. No. 62/398,490 filed Sep. 22, 2016, U.S. Ser. No. 62/408,686 filed Oct. 14, 2016, and U.S. Ser. No. 62/357,332 filed Jun. 30, 2016; each of which is incorporated herein by reference.

### GOVERNMENT SUPPORT

[0002] This invention was made with Government support under grant number EB022376 (formerly GM065400) awarded by the National Institutes of Health. The Government has certain rights in the invention.

### REFERENCE TO A SEQUENCE LISTING SUBMITTED AS A TEXT FILE VIA EFS-WEB

[0003] This application contains a Sequence Listing which has been submitted in ASCII format via EFS-Web and is hereby incorporated by reference in its entirety. Said ASCII copy, created on Nov. 9, 2021, is named H082470213US10-SEQ-EPG and is 4,463,178 bytes in size.

### BACKGROUND OF THE INVENTION

[0004] Targeted editing of nucleic acid sequences, for example, the targeted cleavage or the targeted introduction of a specific modification into genomic DNA, is a highly promising approach for the study of gene function and also has the potential to provide new therapies for human genetic diseases.¹ An ideal nucleic acid editing technology possesses three characteristics: (1) high efficiency of installing the desired modification; (2) minimal off-target activity; and (3) the ability to be programmed to edit precisely any site in a given nucleic acid, e.g., any site within the human genome.² Current genome engineering tools, including engineered zinc finger nucleases (ZFNs),³ transcription activator like effector nucleases (TALENs),⁴ and most recently, the RNA-guided DNA endonuclease Cas9,⁵ effect sequence-specific DNA cleavage in a genome. This programmable cleavage can result in mutation of the DNA at the cleavage site via non-homologous end joining (NHEJ) or replacement of the DNA surrounding the cleavage site via homology-directed repair (HDR).^{6,7}

[0005] One drawback to the current technologies is that both NHEJ and HDR are stochastic processes that typically result in modest gene editing efficiencies as well as unwanted gene alterations that can compete with the desired alteration.⁸ Since many genetic diseases in principle can be treated by effecting a specific nucleotide change at a specific location in the genome (for example, a C to T change in a specific codon of a gene associated with a disease),⁹ the development of a programmable way to achieve such precision gene editing would represent both a powerful new research tool, as well as a potential new approach to gene editing-based human therapeutics.

### SUMMARY OF THE INVENTION

[0006] The clustered regularly interspaced short palindromic repeat (CRISPR) system is a recently discovered prokaryotic adaptive immune system¹⁰ that has been modified to enable robust and general genome engineering in a variety of organisms and cell lines.¹¹ CRISPR-Cas (CRISPR associated) systems are protein-RNA complexes that use an RNA molecule (sgRNA) as a guide to localize the complex to a target DNA sequence via base-pairing.¹² In the natural systems, a Cas protein then acts as an endonuclease to cleave the targeted DNA sequence.¹³ The target DNA sequence must be both complementary to the sgRNA, and also contain a “protospacer-adjacent motif” (PAM) at the 3′-end of the complementary region in order for the system to function.¹⁴

[0007] Among the known Cas proteins, S. pyogenes Cas9 has been mostly widely used as a tool for genome engineering.¹⁵ This Cas9 protein is a large, multi-domain protein containing two distinct nuclease domains. Point mutations can be introduced into Cas9 to abolish nuclease activity, resulting in a dead Cas9 (dCas9) that still retains its ability to bind DNA in a sgRNA-programmed manner.¹⁶ In principle, when fused to another protein or domain, dCas9 can target that protein to virtually any DNA sequence simply by co-expression with an appropriate sgRNA.

[0008] The potential of the dCas9 complex for genome engineering purposes is immense. Its unique ability to bring proteins to specific sites in a genome programmed by the sgRNA in theory can be developed into a variety of site-specific genome engineering tools beyond nucleases, including transcriptional activators, transcriptional repressors, histone-modifying proteins, integrases, and recombinases.¹¹ Some of these potential applications have recently been implemented through dCas9 fusions with transcriptional activators to afford RNA-guided transcriptional activators,^{17,18} transcriptional repressors,^{16,19,20} and chromatin modification enzymes.²¹ Simple co-expression of these fusions with a variety of sgRNAs results in specific expression of the target genes. These seminal studies have paved the way for the design and construction of readily programmable sequence-specific effectors for the precise manipulation of genomes.

[0009] Significantly, 80-90% of protein mutations responsible for human disease arise from the substitution, deletion, or insertion of only a single nucleotide.⁶ Most current strategies for single-base gene correction include engineered nucleases (which rely on the creation of double-strand breaks, DSBs, followed by stochastic, inefficient homology-directed repair, HDR), and DNA-RNA chimeric oligonucleotides.²² The latter strategy involves the design of a RNA/DNA sequence to base pair with a specific sequence in genomic DNA except at the nucleotide to be edited. The resulting mismatch is recognized by the cell's endogenous repair system and fixed, leading to a change in the sequence of either the chimera or the genome. Both of these strategies suffer from low gene editing efficiencies and unwanted gene alterations, as they are subject to both the stochasticity of HDR and the competition between HDR and non-homologous end-joining, NHEJ.²³⁻²⁵ HDR efficiencies vary according to the location of the target gene within the genome,²⁶ the state of the cell cycle,²⁷ and the type of cell/tissue.²⁸ The development of a direct, programmable way to install a specific type of base modification at a precise location in genomic DNA with enzyme-like efficiency and no stochasticity therefore represents a powerful new approach to gene editing-based research tools and human therapeutics.

[0010] Some aspects of the disclosure are based on the recognition that certain configurations of a dCas9 domain, and a cytidine deaminase domain fused by a linker are useful for efficiently deaminating target cytidine residues. Other aspects of this disclosure relate to the recognition that a nucleobase editing fusion protein with a cytidine deaminase domain fused to the N-terminus of a nuclease inactive Cas9 (dCas9) via a linker was capable of efficiently deaminating target nucleic acids in a double stranded DNA target molecule. See for example, Examples 3 and 4 below, which demonstrate that the fusion proteins, which are also referred to herein as base editors, generate less indels and more efficiently deaminate target nucleic acids than other base editors, such as base editors without a UGI domain. In some embodiments, the fusion protein comprises a nuclease-inactive Cas9 (dCas9) domain and an apolipoprotein B mRNA-editing complex 1 (APOBEC1) deaminase domain, where the deaminase domain is fused to the N-terminus of the dCas9 domain via a linker comprising the amino acid sequence SGSETPGTSESATPES (SEQ ID NO: 7). In some embodiments, the nuclease-inactive Cas9 (dCas9) domain of comprises the amino acid sequence set forth in SEQ ID NO: 263. In some embodiments, the deaminase is rat APOBEC1 (SEQ ID NO: 284). In some embodiments, the deaminase is human APOBEC1 (SEQ ID NO: 282). In some embodiments, the deaminase is pmCDA1 (SEQ ID NO: 5738). In some embodiments, the deaminase is human APOBEC3G (SEQ ID NO: 275). In some embodiments, the deaminase is a human APOBEC3G variant of any one of (SEQ ID NOs: 5739-5741).

[0011] Some aspects of the disclosure are based on the recognition that certain configurations of a dCas9 domain, and a cytidine deaminase domain fused by a linker are useful for efficiently deaminating target cytidine residues. Other aspects of this disclosure relate to the recognition that a nucleobase editing fusion protein with an apolipoprotein B mRNA-editing complex 1 (APOBEC1) deaminase domain fused to the N-terminus of a nuclease inactive Cas9 (dCas9) via a linker comprising the amino acid sequence SGSETPGTSESATPES (SEQ ID NO: 7) was capable of efficiently deaminating target nucleic acids in a double stranded DNA target molecule. In some embodiments, the fusion protein comprises a nuclease-inactive Cas9 (dCas9) domain and an apolipoprotein B mRNA-editing complex 1 (APOBEC1) deaminase domain, where the deaminase domain is fused to the N-terminus of the dCas9 domain via a linker comprising the amino acid sequence SGSETPGTSESATPES (SEQ ID NO: 7).

[0012] In some embodiments, the fusion protein comprises the amino acid residues 11-1629 of the amino acid sequence set forth in SEQ ID NO: 591. In some embodiments, the fusion protein comprises the amino acid sequence set forth in SEQ ID NO: 591. In some embodiments, the fusion protein comprises the amino acid sequence of any one of SEQ ID NOs: 5737, 5743, 5745, and 5746.

[0013] Some aspects of this disclosure provide strategies, systems, reagents, methods, and kits that are useful for the targeted editing of nucleic acids, including editing a single site within a subject's genome, e.g., a human's genome. In some embodiments, fusion proteins of Cas9 (e.g., dCas9, nuclease active Cas9, or Cas9 nickase) and deaminases or deaminase domains, are provided. In some embodiments, methods for targeted nucleic acid editing are provided. In some embodiments, reagents and kits for the generation of targeted nucleic acid editing proteins, e.g., fusion proteins of Cas9 and deaminases or deaminase domains, are provided.

[0014] Some aspects of this disclosure provide fusion proteins comprising a Cas9 protein as provided herein that is fused to a second protein (e.g., an enzymatic domain such as a cytidine deaminase domain), thus forming a fusion protein. In some embodiments, the second protein comprises an enzymatic domain, or a binding domain. In some embodiments, the enzymatic domain is a nuclease, a nickase, a recombinase, a deaminase, a methyltransferase, a methylase, an acetylase, an acetyltransferase, a transcriptional activator, or a transcriptional repressor domain. In some embodiments, the enzymatic domain is a nucleic acid editing domain. In some embodiments, the nucleic acid editing domain is a deaminase domain. In some embodiments, the deaminase is a cytosine deaminase or a cytidine deaminase. In some embodiments, the deaminase is an apolipoprotein B mRNA-editing complex (APOBEC) family deaminase. In some embodiments, the deaminase is an APOBEC1 deaminase. In some embodiments, the deaminase is an APOBEC2 deaminase. In some embodiments, the deaminase is an APOBEC3 deaminase. In some embodiments, the deaminase is an APOBEC3A deaminase. In some embodiments, the deaminase is an APOBEC3B deaminase. In some embodiments, the deaminase is an APOBEC3C deaminase. In some embodiments, the deaminase is an APOBEC3D deaminase. In some embodiments, the deaminase is an APOBEC3E deaminase. In some embodiments, the deaminase is an APOBEC3F deaminase. In some embodiments, the deaminase is an APOBEC3G deaminase. In some embodiments, the deaminase is an APOBEC3H deaminase. In some embodiments, the deaminase is an APOBEC4 deaminase. In some embodiments, the deaminase is an activation-induced deaminase (AID). It should be appreciated that the deaminase may be from any suitable organism (e.g., a human or a rat). In some embodiments, the deaminase is from a human, chimpanzee, gorilla, monkey, cow, dog, rat, or mouse. In some embodiments, the deaminase is rat APOBEC1 (SEQ ID NO: 284). In some embodiments, the deaminase is human APOBEC1 (SEQ ID NO: 282). In some embodiments, the deaminase is pmCDA1.

[0015] Some aspects of this disclosure provide fusion proteins comprising: (i) a nuclease-inactive Cas9 (dCas9) domain comprising the amino acid sequence of SEQ ID NO: 263; and (ii) an apolipoprotein B mRNA-editing complex 1 (APOBEC1) deaminase domain, wherein the deaminase domain is fused to the N-terminus of the dCas9 domain via a linker comprising the amino acid sequence of SGSETPGTSESATPES (SEQ ID NO: 7). In some embodiments, the deaminase is rat APOBEC1 (SEQ ID NO: 284). In some embodiments, the deaminase is human APOBEC1 (SEQ ID NO: 282). In some embodiments, the fusion protein comprises the amino acid sequence of SEQ ID NO: 591. In some embodiments, the fusion protein comprises the amino acid sequence of SEQ ID NO: 5737. In some embodiments, the deaminase is pmCDA1 (SEQ ID NO: 5738). In some embodiments, the deaminase is human APOBEC3G (SEQ ID NO: 275). In some embodiments, the deaminase is a human APOBEC3G variant of any one of SEQ ID NOs: 5739-5741.

[0016] Some aspects of this disclosure provide fusion proteins comprising: (i) a Cas9 nickase domain and (ii) an apolipoprotein B mRNA-editing complex 1 (APOBEC1) deaminase domain, wherein the deaminase domain is fused to the N-terminus of the Cas9 nickase domain. In some embodiments, the Cas9 nickase domain comprises a D10X mutation of the amino acid sequence provided in SEQ ID NO: 10, or a corresponding mutation in any of the amino acid sequences provided in SEQ ID NOs: 11-260, wherein X is any amino acid except for D. In some embodiments, the amino acid sequence of the Cas9 nickase domain comprises a D10A mutation of the amino acid sequence provided in SEQ ID NO: 10, or a corresponding mutation in any of the amino acid sequences provided in SEQ ID NOs: 11-260. In some embodiments, the amino acid sequence of the Cas9 nickase domain comprises a histidine at amino acid position 840 of the amino acid sequence provided in SEQ ID NO: 10, or a corresponding amino acid position in any of the amino acid sequences provided in SEQ ID NOs: 11-260. In some embodiments, the amino acid sequence of the Cas9 nickase domain comprises the amino acid sequence as set forth in SEQ ID NO: 267. In some embodiments, the deaminase is rat APOBEC1 (SEQ ID NO: 284). In some embodiments, the deaminase is human APOBEC1 (SEQ ID NO: 282). In some embodiments, the deaminase is pmCDA1.

[0017] Some aspects of this disclosure provide fusion proteins comprising: (i) a Cas9 nickase domain and (ii) an apolipoprotein B mRNA-editing complex 1 (APOBEC1) deaminase domain, wherein the deaminase domain is fused to the N-terminus of the Cas9 nickase domain. In some embodiments, the Cas9 nickase domain comprises a D10X mutation of the amino acid sequence provided in SEQ ID NO: 10, or a corresponding mutation in any of the amino acid sequences provided in SEQ ID NOs: 11-260, wherein X is any amino acid except for D. In some embodiments, the amino acid sequence of the Cas9 nickase domain comprises a D10A mutation of the amino acid sequence provided in SEQ ID NO: 10, or a corresponding mutation in any of the amino acid sequences provided in SEQ ID NOs: 11-260. In some embodiments, the amino acid sequence of the Cas9 nickase domain comprises a histidine at amino acid position 840 of the amino acid sequence provided in SEQ ID NO: 10, or a corresponding amino acid position in any of the amino acid sequences provided in SEQ ID NOs: 11-260. In some embodiments, the amino acid sequence of the Cas9 nickase domain comprises the amino acid sequence as set forth in SEQ ID NO: 267. In some embodiments, the deaminase is rat APOBEC1 (SEQ ID NO: 284). In some embodiments, the deaminase is human APOBEC1 (SEQ ID NO: 282). In some embodiments, the deaminase is pmCDA1.

[0018] Other aspects of this disclosure relate to the recognition that fusion proteins comprising a deaminase domain, a dCas9 domain and a uracil glycosylase inhibitor (UGI) domain demonstrate improved efficiency for deaminating target nucleotides in a nucleic acid molecule. Without wishing to be bound by any particular theory, cellular DNA-repair response to the presence of U:G heteroduplex DNA may be responsible for a decrease in nucleobase editing efficiency in cells. Uracil DNA glycosylase (UDG) catalyzes removal of U from DNA in cells, which may initiate base excision repair, with reversion of the U:G pair to a C:G pair as the most common outcome. As demonstrated herein, Uracil DNA Glycosylase Inhibitor (UGI) may inhibit human UDG activity. Without wishing to be bound by any particular theory, base excision repair may be inhibited by molecules that bind the single strand, block the edited base, inhibit UGI, inhibit base excision repair, protect the edited base, and/or promote “fixing” of the non-edited strand, etc. Thus, this disclosure contemplates fusion proteins comprising a dCas9-cytidine deaminase domain that is fused to a UGI domain.

[0019] In some embodiments, the fusion protein comprises a nuclease-inactive Cas9 (dCas9) domain; a nucleic acid editing domain; and a uracil glycosylase inhibitor (UGI) domain. In some embodiments, the dCas9 domain comprises a D10X mutation of the amino acid sequence provided in SEQ ID NO: 10, or a corresponding mutation in any of the amino acid sequences provided in SEQ ID NOs: 11-260, wherein X is any amino acid except for D. In some embodiments, the amino acid sequence of the dCas9 domain comprises a D10A mutation of the amino acid sequence provided in SEQ ID NO: 10, or a corresponding mutation in any of the amino acid sequences provided in SEQ ID NOs: 11-260. In some embodiments, the amino acid sequence of the dCas9 domain comprises an H840X mutation of the amino acid sequence provided in SEQ ID NO: 10, or a corresponding mutation in any of the amino acid sequences provided in SEQ ID NOs: 11-260, wherein X is any amino acid except for H. In some embodiments, the amino acid sequence of the dCas9 domain comprises an H840A mutation of the amino acid sequence provided in SEQ ID NO: 10, or a corresponding mutation in any of the amino acid sequences provided in SEQ ID NOs: 11-260. In some embodiments, the dCas9 domain comprises the amino acid sequence as set forth in SEQ ID NO: 263.

[0020] Further aspects of this disclosure relate to the recognition that fusion proteins using a Cas9 nickase as the Cas9 domain demonstrate improved efficiency for editing nucleic acids. For example, aspects of this disclosure relate to the recognition that fusion proteins comprising a Cas9 nickase, a deaminase domain and a UGI domain demonstrate improved efficiency for editing nucleic acids. For example, the improved efficiency for editing nucleotides is described below in the Examples section.

[0021] Some aspects of the disclosure are based on the recognition that any of the base editors provided herein are capable of modifying a specific nucleotide base without generating a significant proportion of indels. An “indel”, as used herein, refers to the insertion or deletion of a nucleotide base within a nucleic acid. Such insertions or deletions can lead to frame shift mutations within a coding region of a gene. In some embodiments, it is desirable to generate base editors that efficiently modify (e.g. mutate or deaminate) a specific nucleotide within a nucleic acid, without generating a large number of insertions or deletions (i.e., indels) in the nucleic acid. In certain embodiments, any of the base editors provided herein are capable of generating a greater proportion of intended modifications (e.g., point mutations or deaminations) versus indels.

[0022] Some aspects of the disclosure are based on the recognition that any of the base editors provided herein are capable of efficiently generating an intended mutation, such as a point mutation, in a nucleic acid (e.g. a nucleic acid within a genome of a subject) without generating a significant number of unintended mutations, such as unintended point mutations.

[0023] In some embodiments, a fusion protein comprises a Cas9 nickase domain, a nucleic acid editing domain; and a uracil glycosylase inhibitor (UGI) domain. In some embodiments, the amino acid sequence of the Cas9 nickase domain comprises a D10X mutation of the amino acid sequence provided in SEQ ID NO: 10, or a corresponding mutation in any of the amino acid sequences provided in SEQ ID NOs: 11-260, wherein X is any amino acid except for D. In some embodiments, the amino acid sequence of the Cas9 nickase domain comprises a D10A mutation of the amino acid sequence provided in SEQ ID NO: 10, or a corresponding mutation in any of the amino acid sequences provided in SEQ ID NOs: 11-260. In some embodiments, the amino acid sequence of the Cas9 nickase domain comprises a histidine at amino acid position 840 of the amino acid sequence provided in SEQ ID NO: 10, or a corresponding amino acid position in any of the amino acid sequences provided in SEQ ID NOs: 11-260. In some embodiments, the amino acid sequence of the Cas9 nickase domain comprises the amino acid sequence as set forth in SEQ ID NO: 267.

[0024] In some embodiments, the deaminase domain of the fusion protein is fused to the N-terminus of the dCas9 domain or the Cas9 nickase. In some embodiments, the UGI domain is fused to the C-terminus of the dCas9 domain or the Cas9 nickase. In some embodiments, the dCas9 domain or the Cas9 nickase and the nucleic acid editing domain are fused via a linker. In some embodiments, the dCas9 domain or the Cas9 nickase and the UGI domain are fused via a linker.

[0025] In certain embodiments, linkers may be used to link any of the peptides or peptide domains of the invention. The linker may be as simple as a covalent bond, or it may be a polymeric linker many atoms in length. In certain embodiments, the linker is a polypeptide or based on amino acids. In other embodiments, the linker is not peptide-like. In certain embodiments, the linker is a covalent bond (e.g., a carbon-carbon bond, disulfide bond, carbon-heteroatom bond, etc.). In certain embodiments, the linker is a carbon-nitrogen bond of an amide linkage. In certain embodiments, the linker is a cyclic or acyclic, substituted or unsubstituted, branched or unbranched aliphatic or heteroaliphatic linker. In certain embodiments, the linker is polymeric (e.g., polyethylene, polyethylene glycol, polyamide, polyester, etc.). In certain embodiments, the linker comprises a monomer, dimer, or polymer of aminoalkanoic acid. In certain embodiments, the linker comprises an aminoalkanoic acid (e.g., glycine, ethanoic acid, alanine, beta-alanine, 3-aminopropanoic acid, 4-aminobutanoic acid, 5-pentanoic acid, etc.). In certain embodiments, the linker comprises a monomer, dimer, or polymer of aminohexanoic acid (Ahx). In certain embodiments, the linker is based on a carbocyclic moiety (e.g., cyclopentane, cyclohexane). In other embodiments, the linker comprises a polyethylene glycol moiety (PEG). In other embodiments, the linker comprises amino acids. In certain embodiments, the linker comprises a peptide. In certain embodiments, the linker comprises an aryl or heteroaryl moiety. In certain embodiments, the linker is based on a phenyl ring. The linker may included functionalized moieties to facilitate attachment of a nucleophile (e.g., thiol, amino) from the peptide to the linker. Any electrophile may be used as part of the linker. Exemplary electrophiles include, but are not limited to, activated esters, activated amides, Michael acceptors, alkyl halides, aryl halides, acyl halides, and isothiocyanates.

[0026] In some embodiments, the linker comprises the amino acid sequence (GGGGS)ₙ (SEQ ID NO: 5), (G)ₙ, (EAAAK)ₙ (SEQ ID NO: 6), (GGS)ₙ, (SGGS)ₙ (SEQ ID NO: 4288), SGSETPGTSESATPES (SEQ ID NO: 7), (XP)ₙ, or any combination thereof, wherein n is independently an integer between 1 and 30, and wherein X is any amino acid. In some embodiments, the linker comprises the amino acid sequence (GGS)ₙ, wherein n is 1, 3, or 7. In some embodiments, the linker comprises the amino acid sequence SGSETPGTSESATPES (SEQ ID NO: 7).

[0027] In some embodiments, the fusion protein comprises the structure [nucleic acid editing domain]-[optional linker sequence]-[dCas9 or Cas9 nickase]-[optional linker sequence]-[UGI]. In some embodiments, the fusion protein comprises the structure [nucleic acid editing domain]-[optional linker sequence]-[UGI]-[optional linker sequence]-[dCas9 or Cas9 nickase]; [UGI]-[optional linker sequence]-[nucleic acid editing domain]-[optional linker sequence]-[dCas9 or Cas9 nickase]; [UGI]-[optional linker sequence]-[dCas9 or Cas9 nickase]-[optional linker sequence]-[nucleic acid editing domain]; [dCas9 or Cas9 nickase]-[optional linker sequence]-[UGI]-[optional linker sequence]-[nucleic acid editing domain]; or [dCas9 or Cas9 nickase]-[optional linker sequence]-[nucleic acid editing domain]-[optional linker sequence]-[UGI].

[0028] In some embodiments, the nucleic acid editing domain comprises a deaminase. In some embodiments, the nucleic acid editing domain comprises a deaminase. In some embodiments, the deaminase is a cytidine deaminase. In some embodiments, the deaminase is an apolipoprotein B mRNA-editing complex (APOBEC) family deaminase. In some embodiments, the deaminase is an APOBEC1 deaminase, an APOBEC2 deaminase, an APOBEC3A deaminase, an APOBEC3B deaminase, an APOBEC3C deaminase, an APOBEC3D deaminase, an APOBEC3F deaminase, an APOBEC3G deaminase, an APOBEC3H deaminase, or an APOBEC4 deaminase. In some embodiments, the deaminase is an activation-induced deaminase (AID). In some embodiments, the deaminase is a Lamprey CDA1 (pmCDA1) deaminase.

[0029] In some embodiments, the deaminase is from a human, chimpanzee, gorilla, monkey, cow, dog, rat, or mouse. In some embodiments, the deaminase is from a human. In some embodiments the deaminase is from a rat. In some embodiments, the deaminase is a rat APOBEC1 deaminase comprising the amino acid sequence set forth in (SEQ ID NO: 284). In some embodiments, the deaminase is a human APOBEC1 deaminase comprising the amino acid sequence set forth in (SEQ ID NO: 282). In some embodiments, the deaminase is pmCDA1 (SEQ ID NO: 5738). In some embodiments, the deaminase is human APOBEC3G (SEQ ID NO: 275). In some embodiments, the deaminase is a human APOBEC3G variant of any one of (SEQ ID NOs: 5739-5741). In some embodiments, the deaminase is at least 80%, at least 85%, at least 90%, at least 92%, at least 95%, at least 96%, at least 97%, at least 98%, at least 99%, or at least 99.5% identical to any one of the amino acid sequences set forth in SEQ ID NOs: 266-284 or 5725-5741.

[0030] In some embodiments, the UGI domain comprises an amino acid sequence that is at least 80%, at least 85%, at least 90%, at least 92%, at least 95%, at least 96%, at least 97%, at least 98%, at least 99%, or at least 99.5% identical to SEQ ID NO: 600. In some embodiments, the UGI domain comprises the amino acid sequence as set forth in SEQ ID NO: 600.

[0031] Some aspects of this disclosure provide complexes comprising a Cas9 protein or a Cas9 fusion protein as provided herein, and a guide RNA bound to the Cas9 protein or the Cas9 fusion protein.

[0032] Some aspects of this disclosure provide methods of using the Cas9 proteins, fusion proteins, or complexes provided herein. For example, some aspects of this disclosure provide methods comprising contacting a DNA molecule (a) with a Cas9 protein or a fusion protein as provided herein and with a guide RNA, wherein the guide RNA is about 15-100 nucleotides long and comprises a sequence of at least 10 contiguous nucleotides that is complementary to a target sequence; or (b) with a Cas9 protein, a Cas9 fusion protein, or a Cas9 protein or fusion protein complex with a gRNA as provided herein.

[0033] Some aspects of this disclosure provide kits comprising a nucleic acid construct, comprising (a) a nucleotide sequence encoding a Cas9 protein or a Cas9 fusion protein as provided herein; and (b) a heterologous promoter that drives expression of the sequence of (a). In some embodiments, the kit further comprises an expression construct encoding a guide RNA backbone, wherein the construct comprises a cloning site positioned to allow the cloning of a nucleic acid sequence identical or complementary to a target sequence into the guide RNA backbone.

[0034] Some aspects of this disclosure provide polynucleotides encoding a Cas9 protein of a fusion protein as provided herein. Some aspects of this disclosure provide vectors comprising such polynucleotides. In some embodiments, the vector comprises a heterologous promoter driving expression of polynucleotide.

[0035] Some aspects of this disclosure provide cells comprising a Cas9 protein, a fusion protein, a nucleic acid molecule, and/or a vector as provided herein.

[0036] The description of exemplary embodiments of the reporter systems above is provided for illustration purposes only and not meant to be limiting. Additional reporter systems, e.g., variations of the exemplary systems described in detail above, are also embraced by this disclosure.

[0037] The summary above is meant to illustrate, in a non-limiting manner, some of the embodiments, advantages, features, and uses of the technology disclosed herein. Other embodiments, advantages, features, and uses of the technology disclosed herein will be apparent from the Detailed Description, the Drawings, the Examples, and the Claims.

### BRIEF DESCRIPTION OF THE DRAWINGS

[0038] FIG. 1 shows the deaminase activity of deaminases on single stranded DNA substrates. Single stranded DNA substrates using randomized PAM sequences (NNN PAM) were used as negative controls. Canonical PAM sequences used (NGG PAM)

[0039] FIG. 2 shows activity of Cas9:deaminase fusion proteins on single stranded DNA substrates.

[0040] FIG. 3 illustrates double stranded DNA substrate binding by Cas9:deaminase:sgRNA complexes.

[0041] FIG. 4 illustrates a double stranded DNA deamination assay.

[0042] FIG. 5 demonstrates that Cas9 fusions can target positions 3-11 of double-stranded DNA target sequences (numbered according to the schematic in FIG. 5). Upper Gel: 1 μM rAPOBEC1-GGS-dCas9, 125 nM dsDNA, 1 equivalent sgRNA. Mid Gel: 1 μM rAPOBEC1-(GGS)₃(SEQ ID NO: 596)-dCas9, 125 nM dsDNA, 1 equivalent sgRNA. Lower Gel: 1.85 μM rAPOBEC1-XTEN-dCas9, 125 nM dsDNA, 1 equivalent sgRNA.

[0043] FIG. 6 demonstrates that the correct guide RNA, e.g., the correct sgRNA, is required for deaminase activity.

[0044] FIG. 7 illustrates the mechanism of target DNA binding of in vivo target sequences by deaminase-dCas9:sgRNA complexes.

[0045] FIG. 8 shows successful deamination of exemplary disease-associated target sequences.

[0046] FIG. 9 shows in vitro C→T editing efficiencies using His6-rAPOBEC1-XTEN-dCas9.

[0047] FIG. 10 shows C→T editing efficiencies in HEK293T cells is greatly enhanced by fusion with UGI.

[0048] FIGS. 11A to 11C show NBE1 mediates specific, guide RNA-programmed C to U conversion in vitro. FIG. 11A: Nucleobase editing strategy. DNA with a target C (red) at a locus specified by a guide RNA (green) is bound by dCas9 (blue), which mediates the local denaturation of the DNA substrate. Cytidine deamination by a tethered APOBEC1 enzyme (orange) converts the target C to U. The resulting G:U heteroduplex can be permanently converted to an A:T base pair following DNA replication or repair. If the U is in the template DNA strand, it will also result in an RNA transcript containing a G to A mutation following transcription. FIG. 11B: Deamination assay showing an activity window of approximately five nucleotides. Following incubation of NBE1-sgRNA complexes with dsDNA substrates at 37° C. for 2 h, the 5′ fluorophore-labeled DNA was isolated and incubated with USER enzyme (uracil DNA glycosylase and endonuclease VIII) at 37° C. for 1 h to induce DNA cleavage at the site of any uracils. The resulting DNA was resolved on a denaturing polyacrylamide gel, and any fluorophore-linked strands were visualized. Each lane is labeled according to the position of the target C within the protospacer, or with “-” if no target C is present, counting the base distal from the PAM as position 1. FIG. 11C: Deaminase assay showing the sequence specificity and sgRNA-dependence of NBE1. The DNA substrate with a target C at position 7 was incubated with NBE1 as in FIG. 11B with either the correct sgRNA, a mismatched sgRNA, or no sgRNA. No C to U editing is observed with the mismatched sgRNA or with no sgRNA. The positive control sample contains a DNA sequence with a U synthetically incorporated at position 7.

[0049] FIGS. 12A to 12B show effects of sequence context and target C position on nucleobase editing efficiency in vitro. FIG. 12A: Effect of changing the sequence surrounding the target C on editing efficiency in vitro. The deamination yield of 80% of targeted strands (40% of total sequencing reads from both strands) for C₇ in the protospacer sequence 5′-TTATTTCGTGGATTTATTTA-3′(SEQ ID NO: 264) was defined as 1.0, and the relative deamination efficiencies of substrates containing all possible single-base mutations at positions 1-6 and 8-13 are shown. Values and error bars reflect the mean and standard deviation of two or more independent biological replicates performed on different days. FIG. 12B: Positional effect of each NC motif on editing efficiency in vitro. Each NC target motif was varied from positions 1 to 8 within the protospacer as indicated in the sequences shown on the right (the PAM shown in red, the protospacer plus one base 5′ to the protospacer are also shown). The percentage of total sequence reads containing T at each of the numbered target C positions following incubation with NBE1 is shown in the graph. Note that the maximum possible deamination yield in vitro is 50% of total sequencing reads (100% of targeted strands). Values and error bars reflect the mean and standard deviation of two or three independent biological replicates performed on different days. FIG. 12B depicts SEQ ID NOs: 285 through 292 from top to bottom, respectively.

[0050] FIGS. 13A to 13C show nucleobase editing in human cells. FIG. 13A: Protospacer (black) and PAM (red) sequences of the six mammalian cell genomic loci targeted by nucleobase editors. Target Cs are indicated with subscripted numbers corresponding to their positions within the protospacer. FIG. 13A depicts SEQ ID NOs: 293 through 298 from top to bottom, respectively. FIG. 13B: HEK293T cells were transfected with plasmids expressing NBE1, NBE2, or NBE3 and an appropriate sgRNA. Three days after transfection, genomic DNA was extracted and analyzed by high-throughput DNA sequencing at the six loci. Cellular C to T conversion percentages, defined as the percentage of total DNA sequencing reads with Ts at the target positions indicated, are shown for NBE1, NBE2, and NBE3 at all six genomic loci, and for wt Cas9 with a donor HDR template at three of the six sites (EMX1, HEK293 site 3, and HEK293 site 4). Values and error bars reflect the mean and standard deviation of three independent biological replicates performed on different days. FIG. 13C: Frequency of indel formation, calculated as described in the Methods, is shown following treatment of HEK293T cells with NBE2 and NBE3 for all six genomic loci, or with wt Cas9 and a single-stranded DNA template for HDR at three of the six sites (EMX1, HEK293 site 3, and HEK293 site 4). Values reflect the mean of at least three independent biological replicates performed on different days.

[0051] FIGS. 14A to 14C show NBE2- and NBE3-mediated correction of three disease-relevant mutations in mammalian cells. For each site, the sequence of the protospacer is indicated to the right of the name of the mutation, with the PAM highlighted in green and the base responsible for the mutation indicated in bold with a subscripted number corresponding to its position within the protospacer. The amino acid sequence above each disease-associated allele is shown, together with the corrected amino acid sequence following nucleobase editing in red. Underneath each sequence are the percentages of total sequencing reads with the corresponding base. Cells were nucleofected with plasmids encoding NBE2 or NBE3 and an appropriate sgRNA. Two days after nucleofection, genomic DNA was extracted and analyzed by HTS to assess pathogenic mutation correction. FIG. 14A: The Alzheimer's disease-associated APOE4 allele is converted to APOE3′ in mouse astrocytes by NBE3 in 11% of total reads (44% of nucleofected astrocytes). Two nearby Cs are also converted to Ts, but with no change to the predicted sequence of the resulting protein (SEQ ID NO: 299). FIG. 14B The cancer-associated p53 N239D mutation is corrected by NBE2 in 11% of treated human lymphoma cells (12% of nucleofected cells) that are heterozygous for the mutation (SEQ ID NO: 300). FIG. 14C The p53 Y163C mutation is corrected by NBE3 in 7.6% of nucleofected human breast cancer cells (SEQ ID NO: 301).

[0052] FIGS. 15A to 15D show effects of deaminase-dCas9 linker length and composition on nucleobase editing. Gel-based deaminase assay showing the deamination window of nucleobase editors with deaminase-Cas9 linkers of GGS (FIG. 15A), (GGS)₃ (SEQ ID NO: 596) (FIG. 15B), XTEN (FIG. 15C), or (GGS)₇ (SEQ ID NO: 597) (FIG. 15D). Following incubation of 1.85 μM editor-sgRNA complexes with 125 nM dsDNA substrates at 37° C. for 2 h, the dye-conjugated DNA was isolated and incubated with USER enzyme (uracil DNA glycosylase and endonuclease VIII) at 37° C. for an additional hour to cleave the DNA backbone at the site of any uracils. The resulting DNA was resolved on a denaturing polyacrylamide gel, and the dye-conjugated strand was imaged. Each lane is numbered according to the position of the target C within the protospacer, or with—if no target C is present. 8U is a positive control sequence with a U synthetically incorporated at position 8.

[0053] FIGS. 16A to 16B show NBE1 is capable of correcting disease-relevant mutations in vitro. FIG. 16A: Protospacer and PAM sequences (red) of seven disease-relevant mutations. The disease-associated target C in each case is indicated with a subscripted number reflecting its position within the protospacer. For all mutations except both APOE4 SNPs, the target C resides in the template (non-coding) strand. FIG. 16A depicts SEQ ID NOs: 302 through 308 from top to bottom, respectively. FIG. 16B: Deaminase assay showing each dsDNA oligonucleotide before (−) and after (+) incubation with NBE1, DNA isolation, and incubation with USER enzymes to cleave DNA at positions containing U. Positive control lanes from incubation of synthetic oligonucleotides containing U at various positions within the protospacer with USER enzymes are shown with the corresponding number indicating the position of the U.

[0054] FIG. 17 shows processivity of NBE1. The protospacer and PAM (red) of a 60-mer DNA oligonucleotide containing eight consecutive Cs is shown at the top. The oligonucleotide (125 nM) was incubated with NBE1 (2 μM) for 2 h at 37° C. The DNA was isolated and analyzed by high-throughput sequencing. Shown are the percent of total reads for the most frequent nine sequences observed. The vast majority of edited strands (>93%) have more than one C converted to T. This figure depicts SEQ ID NO: 309.

[0055] FIGS. 18A to 18H show the effect of fusing UGI to NBE1 to generate NBE2. FIG. 18A: Protospacer and PAM (red) sequences of the six mammalian cell genomic loci targeted with nucleobase editors. Editable Cs are indicated with labels corresponding to their positions within the protospacer. FIG. 18A depicts SEQ ID NOs: 293 through 298 from top to bottom, respectively. FIGS. 18B to 18G: HEK293T cells were transfected with plasmids expressing NBE1, NBE2, or NBE1 and UGI, and an appropriate sgRNA. Three days after transfection, genomic DNA was extracted and analyzed by high-throughput DNA sequencing at the six loci. Cellular C to T conversion percentages, defined as the percentage of total DNA sequencing reads with Ts at the target positions indicated, are shown for NBE1, NBE1 and UGI, and NBE2 at all six genomic loci. FIG. 18H: C to T mutation rates at 510 Cs surrounding the protospacers of interest for NBE1, NBE1 plus UGI on a separate plasmid, NBE2, and untreated cells are shown. The data show the results of 3,000,000 DNA sequencing reads from 1.5×106 cells. Values reflect the mean of at least two biological experiments conducted on different days.

[0056] FIG. 19 shows nucleobase editing efficiencies of NBE2 in U2OS and H1 EK293T cells. Cellular C to T conversion percentages by NBE2 are shown for each of the six targeted genomic loci in HEK293T cells and U2OS cells. HEK293T cells were transfected using lipofectamine 2000, and U2OS cells were nucleofected. U2OS nucleofection efficiency was 74%. Three days after plasmid delivery, genomic DNA was extracted and analyzed for nucleobase editing at the six genomic loci by HTS. Values and error bars reflect the mean and standard deviation of at least two biological experiments done on different days.

[0057] FIG. 20 shows nucleobase editing persists over multiple cell divisions. Cellular C to T conversion percentages by NBE2 are displayed at two genomic loci in HEK293T cells before and after passaging the cells. HEK293T cells were transfected using Lipofectamine 2000. Three days post transfection, the cells were harvested and split in half. One half was subjected to HTS analysis, and the other half was allowed to propagate for approximately five cell divisions, then harvested and subjected to HTS analysis.

[0058] FIG. 21 shows genetic variants from ClinVar that can be corrected in principle by nucleobase editing. The NCBI ClinVar database of human genetic variations and their corresponding phenotypes⁶⁸ was searched for genetic diseases that can be corrected by current nucleobase editing technologies. The results were filtered by imposing the successive restrictions listed on the left. The x-axis shows the number of occurrences satisfying that restriction and all above restrictions on a logarithmic scale.

[0059] FIG. 22 shows in vitro identification of editable Cs in six genomic loci. Synthetic 80-mers with sequences matching six different genomic sites were incubated with NBE1 then analyzed for nucleobase editing via HTS. For each site, the sequence of the protospacer is indicated to the right of the name of the site, with the PAM highlighted in red. Underneath each sequence are the percentages of total DNA sequencing reads with the corresponding base. A target C was considered as “editable” if the in vitro conversion efficiency is >10%. Note that maximum yields are 50% of total DNA sequencing reads since the non-targeted strand is not a substrate for nucleobase editing. This figure depicts SEQ ID NOs: 293 through 298 from top to bottom, respectively.

[0060] FIG. 23 shows activities of NBE1, NBE2, and NBE3 at EMX1 off-targets. HEK293T cells were transfected with plasmids expressing NBE1, NBE2, or NBE3 and a sgRNA matching the EMX1 sequence using Lipofectamine 2000. Three days after transfection, genomic DNA was extracted, amplified by PCR, and analyzed by high-throughput DNA sequencing at the on-target loci, plus the top ten known Cas9 off-target loci for the EMX1 sgRNA, as previously determined using the GUIDE-seq method⁵⁵. EMX1 off-target 5 locus did not amplify and is not shown. Sequences of the on-target and off-target protospacers and protospacer adjacent motifs (PAMs) are displayed. Cellular C to T conversion percentages, defined as the percentage of total DNA sequencing reads with T at each position of an original C within the protospacer, are shown for NBE1, NBE2, and NBE3. On the far right are displayed the total number of sequencing reads reported for each sequence. This figure depicts SEQ ID NOs: 293, and 310 through 318 from top to bottom, respectively.

[0061] FIG. 24 shows activities of NBE1, NBE2, and NBE3 at FANCF off-targets. HEK293T cells were transfected with plasmids expressing NBE1, NBE2, or NBE3 and a sgRNA matching the FANCF sequence using Lipofectamine 2000. Three days after transfection, genomic DNA was extracted, amplified by PCR, and analyzed by high-throughput DNA sequencing at the on-target loci, plus all of the known Cas9 off-target loci for the FANCF sgRNA, as previously determined using the GUIDE-seq method⁵⁵. Sequences of the on-target and off-target protospacers and protospacer adjacent motifs (PAMs) are displayed. Cellular C to T conversion percentages, defined as the percentage of total DNA sequencing reads with T at each position of an original C within the protospacer, are shown for NBE1, NBE2, and NBE3. On the far right are displayed the total number of sequencing reads reported for each sequence. This figure depicts SEQ ID NOs: 294 and 319 through 326 from top to bottom, respectively.

[0062] FIG. 25 shows activities of NBE1, NBE2, and NBE3 at HEK293 site 2 off-targets. HEK293T cells were transfected with plasmids expressing NBE1, NBE2, or NBE3 and a sgRNA matching the HEK293 site 2 sequence using Lipofectamine 2000. Three days after transfection, genomic DNA was extracted, amplified by PCR, and analyzed by high-throughput DNA sequencing at the on-target loci, plus all of the known Cas9 off-target loci for the HEK293 site 2 sgRNA, as previously determined using the GUIDE-seq method⁵⁵. Sequences of the on-target and off-target protospacers and protospacer adjacent motifs (PAMs) are displayed. Cellular C to T conversion percentages, defined as the percentage of total DNA sequencing reads with T at each position of an original C within the protospacer, are shown for NBE1, NBE2, and NBE3. On the far right are displayed the total number of sequencing reads reported for each sequence. This figure depicts SEQ ID NOs: 295, 327, and 328 from top to bottom, respectively.

[0063] FIG. 26 shows activities of NBE1, NBE2, and NBE3 at HEK293 site 3 off-targets. HEK293T cells were transfected with plasmids expressing NBE1, NBE2, or NBE3 and a sgRNA matching the HEK293 site 3 sequence using Lipofectamine 2000. Three days after transfection, genomic DNA was extracted, amplified by PCR, and analyzed by high-throughput DNA sequencing at the on-target loci, plus all of the known Cas9 off-target loci for the HEK293 site 3 sgRNA, as previously determined using the GUIDE-seq method⁵⁵. Sequences of the on-target and off-target protospacers and protospacer adjacent motifs (PAMs) are displayed. Cellular C to T conversion percentages, defined as the percentage of total DNA sequencing reads with T at each position of an original C within the protospacer, are shown for NBE1, NBE2, and NBE3. On the far right are displayed the total number of sequencing reads reported for each sequence. This figure depicts SEQ ID NOs: 296 and 659 through 663 from top to bottom, respectively.

[0064] FIG. 27 shows activities of NBE1, NBE2, and NBE3 at HEK293 site 4 off-targets. HEK293T cells were transfected with plasmids expressing NBE1, NBE2, or NBE3 and a sgRNA matching the HEK293 site 4 sequence using Lipofectamine 2000. Three days after transfection, genomic DNA was extracted, amplified by PCR, and analyzed by high-throughput DNA sequencing at the on-target loci, plus the top ten known Cas9 off-target loci for the HEK293 site 4 sgRNA, as previously determined using the GUIDE-seq method⁵⁵. Sequences of the on-target and off-target protospacers and protospacer adjacent motifs (PAMs) are displayed. Cellular C to T conversion percentages, defined as the percentage of total DNA sequencing reads with T at each position of an original C within the protospacer, are shown for NBE1, NBE2, and NBE3. On the far right are displayed the total number of sequencing reads reported for each sequence. This figure depicts SEQ ID NOs: 297 and 664 through 673 from top to bottom, respectively.

[0065] FIG. 28 shows non-target C mutation rates. Shown here are the C to T mutation rates at 2,500 distinct cytosines surrounding the six on-target and 34 off-target loci tested, representing a total of 14,700,000 sequence reads derived from approximately 1.8×106 cells.

[0066] FIGS. 29A to 29C show base editing in human cells. FIG. 29A shows possible base editing outcomes in mammalian cells. Initial editing resulted in a U:G mismatch. Recognition and excision of the U by uracil DNA glycosylase (UDG) initiated base excision repair (BER), which lead to reversion to the C:G starting state. BER was impeded by BE2 and BE3, which inhibited UDG. The U:G mismatch was also processed by mismatch repair (MMR), which preferentially repaired the nicked strand of a mismatch. BE3 nicked the non-edited strand containing the G, favoring resolution of the U:G mismatch to the desired U:A or T:A outcome. FIG. 29B shows HEK293T cells treated as described in the Materials and Methods in the Examples below. The percentage of total DNA sequencing read with Ts at the target positions indicated show treatment with BE1, BE2, or BE3, or for treatment with wt Cas9 with a donor HDR template. FIG. 29C shows frequency of indel formation following the treatment in FIG. 29B. Values are listed in FIG. 34. For FIGS. 29B and 29C, values and error bars reflect the mean and s.d. of three independent biological replicates performed on different days.

[0067] FIGS. 30A to 30B show BE3-mediated correction of two disease-relevant mutations in mammalian cells. The sequence of the protospacer is shown to the right of the mutation, with the PAM in blue and the target base in red with a subscripted number indicating its position within the protospacer. Underneath each sequence are the percentages of total sequencing reads with the corresponding base. Cells were treated as described in the Materials and Methods. FIG. 30A shows the Alzheimer's disease-associated APOE4 allele converted to APOE3r in mouse astrocytes by BE3 in 74.9% of total reads. Two nearby Cs were also converted to Ts, but with no change to the predicted sequence of the resulting protein. Identical treatment of these cells with wt Cas9 and donor ssDNA results in only 0.3% correction, with 26.1% indel formation. FIG. 30B shows the cancer associated p53 Y163C mutation corrected by BE3 in 7.6% of nucleofected human breast cancer cells with 0.7% indel formation. Identical treatment of these cells with wt Cas9 and donor ssDNA results in no mutation correction with 6.1% indel formation. This figure depicts SEQ ID NOs: 675 to 680 from top to bottom, respectively.

[0068] FIG. 31 shows activities of BE1, BE2, and BE3 at HEK293 site 2 off-targets. HEK293T cells were transfected with plasmids expressing BE1, BE2, or BE3 and a sgRNA matching the HEK293 site 2 sequence using Lipofectamine 2000. Three days after transfection, genomic DNA was extracted, amplified by PCR, and analyzed by high-throughput DNA sequencing at the on-target loci, plus all of the known Cas9 and dCas9 off-target loci for the HEK293 site 2 sgRNA, as previously determined by Joung and coworkers using the GUIDE-seq method (63), and Adli and coworkers using chromatin immunoprecipitation high-throughput sequencing (ChIP-seq) experiments (18). Sequences of the on-target and off-target protospacers and protospacer adjacent motifs (PAMs) are displayed. Cellular C to T conversion percentages, defined as the percentage of total DNA sequencing reads with T at each position of an original C within the protospacer, are shown for BE1, BE2, and BE3. On the far right are displayed the total number of sequencing reads reported, and the ChIP-seq signal intensity reported for each sequence. This figure depicts SEQ ID NOs: 681 to 688 from top to bottom, respectively.

[0069] FIG. 32 shows activities of BE1, BE2, and BE3 at HEK293 site 3 off-targets. HEK293T cells were transfected with plasmids expressing BE1, BE2, or BE3 and a sgRNA matching the HEK293 site 3 sequence using Lipofectamine 2000. Three days after transfection, genomic DNA was extracted, amplified by PCR, and analyzed by high-throughput DNA sequencing at the on-target loci, plus all of the known Cas9 off-target loci and the top five known dCas9 off-target loci for the HEK293 site 3 sgRNA, as previously determined by Joung and coworkers using the GUIDE-seq method⁵⁴, and using chromatin immunoprecipitation high-throughput sequencing (ChIP-seq) experiments⁶¹. Sequences of the on-target and off-target protospacers and protospacer adjacent motifs (PAMs) are displayed. Cellular C to T conversion percentages, defined as the percentage of total DNA sequencing reads with T at each position of an original C within the protospacer, are shown for BE1, BE2, and BE3. On the far right are displayed the total number of sequencing reads reported, and the ChIP-seq signal intensity reported for each sequence. This figure depicts SEQ ID NOs: 689 to 699 from top to bottom, respectively.

[0070] FIG. 33 shows activities of BE1, BE2, and BE3 at HEK293 site 4 off-targets. HEK293T cells were transfected with plasmids expressing BE1, BE2, or BE3 and a sgRNA matching the HEK293 site 4 sequence using Lipofectamine 2000. Three days after transfection, genomic DNA was extracted, amplified by PCR, and analyzed by high-throughput DNA sequencing at the on-target loci, plus the top ten known Cas9 off-target loci and the top five known dCas9 off-target loci for the HEK293 site 4 sgRNA, as previously determined using the GUIDE-seq method⁵⁴, and using chromatin immunoprecipitation high-throughput sequencing (ChIP-seq) experiments 61. Sequences of the on-target and off-target protospacers and protospacer adjacent motifs (PAMs) are displayed. Cellular C to T conversion percentages, defined as the percentage of total DNA sequencing reads with T at each position of an original C within the protospacer, are shown for BE1, BE2, and BE3. On the far right are displayed the total number of sequencing reads reported, and the ChIP-seq signal intensity reported for each sequence. This figure depicts SEQ ID NOs: 700 to 712 from top to bottom, respectively.

[0071] FIG. 34 shows mutation rates of non-protospacer bases following BE3-mediated correction of the Alzheimer's disease-associated APOE4 allele to APOE3r in mouse astrocytes. The DNA sequence of the 50 bases on either side of the protospacer from FIG. 30A and FIG. 34B is shown with each base's position relative to the protospacer. The side of the protospacer distal to the PAM is designated with positive numbers, while the side that includes the PAM is designated with negative numbers, with the PAM shown in blue. Underneath each sequence are the percentages of total DNA sequencing reads with the corresponding base for untreated cells, for cells treated with BE3 and an sgRNA targeting the APOE4 C158R mutation, or for cells treated with BE3 and an sgRNA targeting the VEGFA locus. Neither BE3-treated sample resulted in mutation rates above those of untreated controls. This figure depicts SEQ ID NOs: 713 to 716 from top to bottom, respectively.

[0072] FIG. 35 shows mutation rates of non-protospacer bases following BE3-mediated correction of the cancer-associated p53 Y163C mutation in HCC1954 human cells. The DNA sequence of the 50 bases on either side of the protospacer from FIG. 30B and FIG. 39B is shown with each base's position relative to the protospacer. The side of the protospacer distal to the PAM is designated with positive numbers, while the side that includes the PAM is designated with negative numbers, with the PAM shown in blue. Underneath each sequence are the percentages of total sequencing reads with the corresponding base for untreated cells, for cells treated with BE3 and an sgRNA targeting the TP53 Y163C mutation, or for cells treated with BE3 and an sgRNA targeting the VEGFA locus. Neither BE3-treated sample resulted in mutational rates above those of untreated controls. This figure depicts SEQ ID NOs: 717 to 720 from top to bottom, respectively.

[0073] FIGS. 36A to 36F show the effects of deaminase, linker length, and linker composition on base editing. FIG. 36A shows a gel-based deaminase assay showing activity of rAPOBEC1, pmCDA1, hAID, hAPOBEC3G, rAPOBEC1-GGS-dCas9, rAPOBEC1-(GGS)₃(SEQ ID NO: 596)-dCas9, and dCas9-(GGS)₃(SEQ ID NO: 596)-rAPOBEC1 on ssDNA. Enzymes were expressed in a mammalian cell lysate-derived in vitro transcription-translation system and incubated with 1.8 μM dye-conjugated ssDNA and USER enzyme (uracil DNA glycosylase and endonuclease VIII) at 37° C. for 2 hours. The resulting DNA was resolved on a denaturing polyacrylamide gel and imaged. The positive control is a sequence with a U synthetically incorporated at the same position as the target C. FIG. 36B shows coomassie-stained denaturing PAGE gel of the expressed and purified proteins used in FIGS. 36C to 36F. FIGS. 36C to 36F show gel-based deaminase assay showing the deamination window of base editors with deaminase-Cas9 linkers of GGS (FIG. 36C), (GGS)₃ (SEQ ID NO: 596) (FIG. 36D), XTEN (FIG. 36E), or (GGS)₇ (SEQ ID NO: 597) (FIG. 36F). Following incubation of 1.85 μM deaminase-dCas9 fusions complexed with sgRNA with 125 nM dsDNA substrates at 37° C. for 2 hours, the dye-conjugated DNA was isolated and incubated with USER enzyme at 37° C. for 1 hour to cleave the DNA backbone at the site of any uracils. The resulting DNA was resolved on a denaturing polyacrylamide gel, and the dye-conjugated strand was imaged. Each lane is numbered according to the position of the target C within the protospacer, or with—if no target C is present. 8U is a positive control sequence with a U synthetically incorporated at position 8.

[0074] FIGS. 37A to 37C show BE1 base editing efficiencies are dramatically decreased in mammalian cells. FIG. 37A Protospacer (black and red) and PAM (blue) sequences of the six mammalian cell genomic loci targeted by base editors. Target Cs are indicated in red with subscripted numbers corresponding to their positions within the protospacer. FIG. 37B shows synthetic 80-mers with sequences matching six different genomic sites were incubated with BE1 then analyzed for base editing by HTS. For each site, the sequence of the protospacer is indicated to the right of the name of the site, with the PAM highlighted in blue. Underneath each sequence are the percentages of total DNA sequencing reads with the corresponding base. We considered a target C as “editable” if the in vitro conversion efficiency is >10%. Note that maximum yields are 50% of total DNA sequencing reads since the non-targeted strand is unaffected by BE1. Values are shown from a single experiment. FIG. 37C shows HEK293T cells were transfected with plasmids expressing BE1 and an appropriate sgRNA. Three days after transfection, genomic DNA was extracted and analyzed by high-throughput DNA sequencing at the six loci. Cellular C to T conversion percentages, defined as the percentage of total DNA sequencing reads with Ts at the target positions indicated, are shown for BE1 at all six genomic loci. Values and error bars of all data from HEK293T cells reflect the mean and standard deviation of three independent biological replicates performed on different days. FIG. 37A depicts SEQ ID NOs: 721 to 726 from top to bottom, respectively. FIG. 37B depicts SEQ ID NOs: 727 to 732 from top to bottom, respectively.

[0075] FIG. 38 shows base editing persists over multiple cell divisions. Cellular C to T conversion percentages by BE2 and BE3 are shown for HEK293 sites 3 and 4 in HEK293T cells before and after passaging the cells. HEK293T cells were nucleofected with plasmids expressing BE2 or BE3 and an sgRNA targeting HEK293 site 3 or 4. Three days after nucleofection, the cells were harvested and split in half. One half was subjected to HTS analysis, and the other half was allowed to propagate for approximately five cell divisions, then harvested and subjected to HTS analysis. Values and error bars reflect the mean and standard deviation of at least two biological experiments.

[0076] FIGS. 39A to 39C show non-target C/G mutation rates. Shown here are the C to T and G to A mutation rates at 2,500 distinct cytosines and guanines surrounding the six on-target and 34 off-target loci tested, representing a total of 14,700,000 sequence reads derived from approximately 1.8×10⁶ cells. FIGS. 39A and 39B show cellular non-target C to T and G to A conversion percentages by BE1, BE2, and BE3 are plotted individually against their positions relative to a protospacer for all 2,500 cytosines/guanines. The side of the protospacer distal to the PAM is designated with positive numbers, while the side that includes the PAM is designated with negative numbers. FIG. 39C shows average non-target cellular C to T and G to A conversion percentages by BE1, BE2, and BE3 are shown, as well as the highest and lowest individual conversion percentages.

[0077] FIGS. 40A to 40B show additional data sets of BE3-mediated correction of two disease-relevant mutations in mammalian cells. For each site, the sequence of the protospacer is indicated to the right of the name of the mutation, with the PAM highlighted in blue and the base responsible for the mutation indicated in red bold with a subscripted number corresponding to its position within the protospacer. The amino acid sequence above each disease-associated allele is shown, together with the corrected amino acid sequence following base editing in green. Underneath each sequence are the percentages of total sequencing reads with the corresponding base. Cells were nucleofected with plasmids encoding BE3 and an appropriate sgRNA. Two days after nucleofection, genomic DNA was extracted from the nucleofected cells and analyzed by HTS to assess pathogenic mutation correction. FIG. 40A shows the Alzheimer's disease-associated APOE4 allele is converted to APOE3r in mouse astrocytes by BE3 in 58.3% of total reads only when treated with the correct sgRNA. Two nearby Cs are also converted to Ts, but with no change to the predicted sequence of the resulting protein. Identical treatment of these cells with wt Cas9 and donor ssDNA results in 0.2% correction, with 26.7% indel formation. FIG. 40B shows the cancer-associated p53 Y163C mutation is corrected by BE3 in 3.3% of nucleofected human breast cancer cells only when treated with the correct sgRNA. Identical treatment of these cells with wt Cas9 and donor ssDNA results in no detectable mutation correction with 8.0% indel formation. FIGS. 40A to 40B depict SEQ ID NOs: 733 to 740 from top to bottom, respectively.

[0078] FIG. 41 shows a schematic representation of an exemplary USER (Uracil-Specific Excision Reagent) Enzyme-based assay, which may be used to test the activity of various deaminases on single-stranded DNA (ssDNA) substrates.

[0079] FIG. 42 is a schematic of the pmCDA-nCas9-UGI-NLS construct and its activity at the HeK-3 site relative to the base editor (rAPOBEC1) and the negative control (untreated).

[0080] FIG. 43 is a schematic of the pmCDA1-XTEN-nCas9-UGI-NLS construct and its activity at the HeK-3 site relative to the base editor (rAPOBEC1) and the negative control (untreated).

[0081] FIG. 44 shows the percent of total sequencing reads with target C converted to T using cytidine deaminases (CDA) or APOBEC.

[0082] FIG. 45 shows the percent of total sequencing reads with target C converted to A using deaminases (CDA) or APOBEC.

[0083] FIG. 46 shows the percent of total sequencing reads with target C converted to G using deaminases (CDA) or APOBEC.

[0084] FIG. 47 is a schematic of the huAPOBEC3G-XTEN-nCas9-UGI-NLS construct and its activity at the HeK-2 site relative to a mutated form (huAPOBEC3G*(D316R_D317R)-XTEN-nCas9-UGI-NLS, the base editor (rAPOBEC1) and the negative control (untreated).

[0085] FIG. 48 shows the schematic of the LacZ construct used in the selection assay of Example 7.

[0086] FIG. 49 shows reversion data from different plasmids and constructs.

[0087] FIG. 50 shows the verification of lacZ reversion and the purification of reverted clones.

[0088] FIG. 51 is a schematic depicting a deamination selection plasmid used in Example 7.

[0089] FIG. 52 shows the results of a chloramphenicol reversion assay (pmCDA1 fusion).

[0090] FIGS. 53A to 53B demonstrated DNA correction induction of two constructs.

[0091] FIG. 54 shows the results of a chloramphenicol reversion assay (huAPOBEC3G fusion).

[0092] FIG. 55 shows the activities of BE3 and HF-BE3 at EMX1 off-targets. The sequences, from top to bottom, correspond to SEQ ID NOs: 286-292, 299-301.

[0093] FIG. 56 shows on-target base editing efficiencies of BE3 and HF-BE3.

[0094] FIG. 57 is a graph demonstrating that mutations affect cytidine deamination with varying degrees. Combinations of mutations that each slightly impairs catalysis allow selective deamination at one position over others. The FANCF site was GGAATC₆C₇C₈TTC₁₁TGCAGCACCTGG (SEQ ID NO: 303).

[0095] FIG. 58 is a schematic depicting next generation base editors.

[0096] FIG. 59 is a schematic illustrating new base editors made from Cas9 variants.

[0097] FIG. 60 shows the base-edited percentage of different NGA PAM sites.

[0098] FIG. 61 shows the base-edited percentage of cytidines using NGCG PAM EMX (VRER BE3) and the C₁TC₃C₄C₅ATC₈AC₁₀ATCAACCGGT (SEQ ID NO: 304) spacer.

[0099] FIG. 62 shows the based-edited percentages resulting from different NNGRRT PAM sites.

[0100] FIG. 63 shows the based-edited percentages resulting from different NNHRRT PAM sites.

[0101] FIGS. 64A to 64C show the base-edited percentages resulting from different TTTN PAM sites using Cpf1 BE2. The spacers used were: TTTCCTC₃C₄C₅C₆C₇C₈C₉AC₁₁AGGTAGAACAT (FIG. 64A, SEQ ID NO: 305), TTTCC₁C₂TC₄TGTC₈C₉AC₁₁ACCCTCATCCTG (FIG. 64B, SEQ ID NO: 306), and TTTCC₁C2C₃AGTC₇C₈TC₁₀C₁₁AC₁₃AC₁₅C₁₆C₁₇TGAAAC (FIG. 64C, SEQ ID NO: 307).

[0102] FIG. 65 is a schematic depicting selective deamination as achieved through kinetic modulation of cytidine deaminase point mutagenesis.

[0103] FIG. 66 is a graph showing the effect of various mutations on the deamination window probed in cell culture with multiple cytidines in the spacer. The spacer used was: TGC₃C₄C₅C₆TC₈C₉C₁₀TC₁₂C₁₃C₁₄TGGCCC (SEQ ID NO: 308).

[0104] FIG. 67 is a graph showing the effect of various mutations on the deamination window probed in cell culture with multiple cytidines in the spacer. The spacer used was: AGAGC₅C₆C₇C₈C₉C₁₀C₁₁TC₁₃AAAGAGA (SEQ ID NO: 309).

[0105] FIG. 68 is a graph showing the effect of various mutations on the FANCF site with a limited number of cytidines. The spacer used was: GGAATC₆C₇C₈TTC₁₁TGCAGCACCTGG (SEQ ID NO: 303). Note that the triple mutant (W90Y, R126E, R132E) preferentially edits the cytidine at the sixth position.

[0106] FIG. 69 is a graph showing the effect of various mutations on the HEK3 site with a limited number of cytidines. The spacer used was: GGCC₄C₅AGACTGAGCACGTGATGG (SEQ ID NO: 310). Note that the double and triple mutants preferentially edit the cytidine at the fifth position over the cytidine in the fourth position.

[0107] FIG. 70 is a graph showing the effect of various mutations on the EMX1 site with a limited number of cytidines. The spacer used was: GAGTC₅C₆GAGCAGAAGAAGAAGGG (SEQ ID NO: 311). Note that the triple mutant only edits the cytidine at the fifth position, not the sixth.

[0108] FIG. 71 is a graph showing the effect of various mutations on the HEK2 site with a limited number of cytidines. The spacer used was: GAAC₄AC₆AAAGCATAGACTGCGGG (SEQ ID NO: 312).

[0109] FIG. 72 shows on-target base editing efficiencies of BE3 and BE3 comprising mutations W90Y R132E in immortalized astrocytes.

[0110] FIG. 73 depicts a schematic of three Cpf1 fusion constructs.

[0111] FIG. 74 shows a comparison of plasmid delivery of BE3 and HF-BE3 (EMX1, FANCF, and RNF2).

[0112] FIG. 75 shows a comparison of plasmid delivery of BE3 and HF-BE3 (HEK3 and HEK 4).

[0113] FIG. 76 shows off-target editing of EMX-1 at all 10 sites.

[0114] FIG. 77 shows deaminase protein lipofection to HEK cells using a GAGTCCGAGCAGAAGAAGAAG (SEQ ID NO: 313) spacer. The EMX-1 on-target and EMX-1 off target site 2 were examined.

[0115] FIG. 78 shows deaminase protein lipofection to HEK cells using a GGAATCCCTTCTGCAGCACCTGG (SEQ ID NO: 314) spacer. The FANCF on target and FANCF off target site 1 were examined.

[0116] FIG. 79 shows deaminase protein lipofection to HEK cells using a GGCCCAGACTGAGCACGTGA (SEQ ID NO: 315) spacer. The HEK-3 on target site was examined.

[0117] FIG. 80 shows deaminase protein lipofection to HEK cells using a GGCACTGCGGCTGGAGGTGGGGG (SEQ ID NO: 316) spacer. The HEK-4 on target, off target site 1, site 3, and site 4.

[0118] FIG. 81 shows the results of an in vitro assay for sgRNA activity for sgHR_13 (GTCAGGTCGAGGGTTCTGTC (SEQ ID NO: 317) spacer; C8 target: G51 to STOP), sgHR_14 (GGGCCGCAGTATCCTCACTC (SEQ ID NO: 318) spacer; C7 target; C7 target: Q68 to STOP), and sgHR_15 (CCGCCAGTCCCAGTACGGGA (SEQ ID NO: 319) spacer; C10 and C11 are targets: W239 or W237 to STOP).

[0119] FIG. 82 shows the results of an in vitro assay for sgHR_17 (CAACCACTGCTCAAAGATGC (SEQ ID NO: 320) spacer; C4 and C5 are targets: W410 to STOP), and sgHR_16 (CTTCCAGGATGAGAACACAG (SEQ ID NO: 321) spacer; C4 and C5 are targets: W273 to STOP).

[0120] FIG. 83 shows the direct injection of BE3 protein complexed with sgHR_13 in zebrafish embryos.

[0121] FIG. 84 shows the direct injection of BE3 protein complexed with sgHR_16 in zebrafish embryos.

[0122] FIG. 85 shows the direct injection of BE3 protein complexed with sgHR_17 in zebrafish embryos.

[0123] FIG. 86 shows exemplary nucleic acid changes that may be made using base editors that are capable of making a cytosine to thymine change.

[0124] FIG. 87 shows an illustration of apolipoprotein E (APOE) isoforms, demonstrating how a base editor (e.g., BE3) may be used to edit one APOE isoform (e.g., APOE4) into another APOE isoform (e.g., APOE3r) that is associated with a decreased risk of Alzheimer's disease.

[0125] FIG. 88 shows base editing of APOE4 to APOE3r in mouse astrocytes.

[0126] FIG. 89 shows base editing of PRNP to cause early truncation of the protein at arginine residue 37.

[0127] FIG. 90 shows that knocking out UDG (which UGI inhibits) dramatically improves the cleanliness of efficiency of C to T base editing.

[0128] FIG. 91 shows that use of a base editor with the nickase but without UGI leads to a mixture of outcomes, with very high indel rates.

[0129] FIGS. 92A to 92G show that SaBE3, SaKKH-BE3, VQR-BE3, EQR-BE3, and VRER-BE3 mediate efficient base editing at target sites containing non-NGG PAMs in human cells. FIG. 92A shows base editor architectures using S. pyogenes and S. aureus Cas9. FIG. 92B shows recently characterized Cas9 variants with alternate or relaxed PAM requirements. FIGS. 92C and 92D show HEK293T cells treated with the base editor variants shown as described in Example 12. The percentage of total DNA sequencing reads (with no enrichment for transfected cells) with C converted to T at the target positions indicated are shown. The PAM sequence of each target tested is shown below the X-axis. The charts show the results for SaBE3 and SaKKH-BE3 at genomic loci with NNGRRT PAMs (FIG. 92C), SaBE3 and SaKKH-BE3 at genomic loci with NNNRRT PAMs (FIG. 92D), VQR-BE3 and EQR-BE3 at genomic loci with NGAG PAMs (FIG. 92E), and with NGAH PAMs (FIG. 92F), and VRER-BE3 at genomic loci with NGCG PAMs (FIG. 92G). Values and error bars reflect the mean and standard deviation of at least two biological replicates.

[0130] FIGS. 93A to 93C demonstrate that base editors with mutations in the cytidine deaminase domain exhibit narrowed editing windows. FIGS. 93A to 93C show HEK293T cells transfected with plasmids expressing mutant base editors and an appropriate sgRNA. Three days after transfection, genomic DNA was extracted and analyzed by high-throughput DNA sequencing at the indicated loci. The percentage of total DNA sequencing reads (without enrichment for transfected cells) with C changed to T at the target positions indicated are shown for the EMX1 site, HEK293 site 3, FANCF site, HEK293 site 2, site A, and site B loci. FIG. 93A illustrates certain cytidine deaminase mutations which narrow the base editing window. See FIG. 98 for the characterization of additional mutations. FIG. 93B shows the effect of cytidine deaminase mutations which effect the editing window width on genomic loci. Combining beneficial mutations has an additive effect on narrowing the editing window. FIG. 93C shows that YE1-BE3, YE2-BE3, EE-BE3, and YEE-BE3 effect the product distribution of base editing, producing predominantly singly-modified products in contrast with BE3. Values and error bars reflect the mean and standard deviation of at least two biological replicates.

[0131] FIGS. 94A and 94B show genetic variants from ClinVar that in principle can be corrected by the base editors developed in this work. The NCBI ClinVar database of human genetic variations and their corresponding phenotypes was searched for genetic diseases that in theory can be corrected by base editing. FIG. 94A demonstrates improvement in base editing targeting scope among all pathogenic T→C mutations in the ClinVar database through the use of base editors with altered PAM specificities. The white fractions denote the proportion of pathogenic T→C mutations accessible on the basis of the PAM requirements of either BE3, or BE3 together with the five modified-PAM base editors developed in this work. FIG. 94B shows improvement in base editing targeting scope among all pathogenic T→C mutations in the ClinVar database through the use of base editors with narrowed activity windows. BE3 was assumed to edit Cs in positions 4-8 with comparable efficiency as shown in FIGS. 93A to 93C. YEE-BE3 was assumed to edit with C5>C6>C7>others preference within its activity window. The white fractions denote the proportion of pathogenic T→C mutations that can be edited BE3 without comparable editing of other Cs (left), or that can be edited BE3 or YEE-BE3 without comparable editing of other Cs (right).

[0132] FIGS. 95A and 95B show the effect of truncated guide RNAs on base editing window width. HEK293T cells were transfected with plasmids expressing BE3 and sgRNAs of different 5′ truncation lengths. The treated cells were analyzed as described in the Examples. FIG. 95A shows protospacer and PAM sequence (top, SEQ ID NO: 4270) and cellular C to T conversion percentages, defined as the percentage of total DNA sequencing reads with Ts at the target positions indicated, at a site within the EMX1 genomic locus. At this site, the base editing window was altered through the use of a 17-nt truncated gRNA. FIG. 95B shows protospacer and PAM sequences (top, SEQ ID NO: 4270) and cellular C to T conversion percentages, defined as the percentage of total DNA sequencing reads with Ts at the target positions indicated, at sites within the HEK site 3 and site 4 genomic loci. At these sites, no change in the base editing window was observed, but a linear decrease in editing efficiency for all substrate bases as the sgRNA is truncated was noted.

[0133] FIG. 96 shows the effect of APOBEC1-Cas9 linker lengths on base editing window width. HEK293T cells were transfected with plasmids expressing base editors with rAPOBEC1-Cas9 linkers of XTEN, GGS, (GGS)₃ (SEQ ID NO: 596), (GGS)₅ (SEQ ID NO: 4271), or (GGS)₇ (SEQ ID NO: 597) and an sgRNA. The treated cells were analyzed as described in the Examples. Cellular C to T conversion percentages, defined as the percentage of total DNA sequencing reads with Ts at the target positions indicated, are shown for the various base editors with different linkers.

[0134] FIGS. 97A to 97C show the effect of rAPOBEC mutations on base editing window width. FIG. 97C shows HEK293T cells transfected with plasmids expressing an sgRNA targeting either Site A or Site B and the BE3 point mutants indicated. The treated cells were analyzed as described in the Examples. All C's in the protospacer and within three basepairs of the protospacer are displayed and the cellular C to T conversion percentages are shown. The ‘editing window widths’, defined as the calculated number of nucleotides within which editing efficiency exceeds the half-maximal value, are displayed for all tested mutants.

[0135] FIG. 98 shows the effect of APOBEC1 mutation son product distributions of base editing in mammalian cells. HEK293T cells were transfected with plasmids expressing BE3 or its mutants and an appropriate sgRNAs. The treated cells were analyzed as described in the Examples. Cellular C to T conversion percentages, defined as the percentage of total DNA sequencing reads with Ts at the target positions indicated, are shown (left). Percent of total sequencing reads containing the C to T conversion is shown on the right. The BE3 point mutants do not significantly affect base editing efficiencies at HEK site 4, a site with only one target cytidine.

[0136] FIG. 99 shows a comparison of on-target editing plasma delivery in BE3 and HF-BE3.

[0137] FIG. 100 shows a comparison of on-target editing in protein and plasma delivery of BE3.

[0138] FIG. 101 shows a comparison of on-target editing in protein and plasma delivery of HF-BE3.

[0139] FIG. 102 shows that both lipofection and installing HF mutations decrease off-target deamination events. The diamond indicates no off targets were detected and the specificity ratio was set to 100.

[0140] FIG. 103 shows in vitro C to T editing on a synthetic substrate with Cs placed at even positions in the protospacer (NNNNTC₂TC₄TC₆TC₈TC₁₀TC₁₂TC₁₄TC₁₆TC₁₈TC₂₀NGG, SEQ ID NO: 4272).

[0141] FIG. 104 shows in vitro C to T editing on a synthetic substrate with Cs placed at odd positions in the protospacer (NNNNTC₂TC₄TC₆TC₈TC₁₀TC₁₂TC₁₄TC₁₆TC₁₈TC₂₀NGG, SEQ ID NO: 4272).

[0142] FIG. 105 includes two graphs depicting the specificity ratio of base editing with plasmid vs. protein delivery.

[0143] FIGS. 106A to 106B shows BE3 activity on non-NGG PAM sites. HEK293T cells were transfected with plasmids expressing BE3 and appropriate sgRNA. The treated cells were analyzed as described in the Examples. FIG. 106A shows BE3 activity on sites can be efficiently targeted by SaBE3 or SaKKH-BE3. BE3 shows low but significant activity on the NAG PAM. FIG. 106B shows BE3 has significantly reduced editing at sites with NGA or NGCG PAMs, in contrast to VQR-BE3 or VRER-BE3.

[0144] FIGS. 107A to 107B show the effect of APOBEC1 mutations on VQR-BE3 and SaKKH-BE3. HEK293T cells were transfected with plasmids expressing VQR-BE3, SaKKH-BE3 or its mutants and an appropriate sgRNAs. The treated cells were analyzed as described in the Methods. Cellular C to T conversion percentages, defined as the percentage of total DNA sequencing reads with Ts at the target positions indicated, are shown. FIG. 107A shows that the window-modulating mutations can be applied to VQR-BE3 to enable selective base editing at sites targetable by NGA PAM. FIG. 107B shows that, when applied to SaKKH-BE3, the mutations cause overall decrease in base editing efficiency without conferring base selectivity within the target window.

[0145] FIG. 108 shows a schematic representation of nucleotide editing. The following abbreviations are used: (MMR)—mismatch repair, (BE3 Nickase)—refers to base editor 3, which comprises a Cas9 nickase domain, (UGI)—uracil glycosylase inhibitor, UDG)—uracil DNA glycosylase, (APOBEC)—refers to an APOBEC cytidine deaminase.

### DEFINITIONS

[0146] As used herein and in the claims, the singular forms “a,” “an,” and “the” include the singular and the plural reference unless the context clearly indicates otherwise. Thus, for example, a reference to “an agent” includes a single agent and a plurality of such agents. The term “Cas9” or “Cas9 nuclease” refers to an RNA-guided nuclease comprising a Cas9 protein, or a fragment thereof (e.g., a protein comprising an active, inactive, or partially active DNA cleavage domain of Cas9, and/or the gRNA binding domain of Cas9). A Cas9 nuclease is also referred to sometimes as a casn1 nuclease or a CRISPR (clustered regularly interspaced short palindromic repeat)-associated nuclease. CRISPR is an adaptive immune system that provides protection against mobile genetic elements (viruses, transposable elements and conjugative plasmids). CRISPR clusters contain spacers, sequences complementary to antecedent mobile elements, and target invading nucleic acids. CRISPR clusters are transcribed and processed into CRISPR RNA (crRNA). In type II CRISPR systems correct processing of pre-crRNA requires a trans-encoded small RNA (tracrRNA), endogenous ribonuclease 3 (rnc) and a Cas9 protein. The tracrRNA serves as a guide for ribonuclease 3-aided processing of pre-crRNA. Subsequently, Cas9/crRNA/tracrRNA endonucleolytically cleaves linear or circular dsDNA target complementary to the spacer. The target strand not complementary to crRNA is first cut endonucleolytically, then trimmed 3′-5′ exonucleolytically. In nature, DNA-binding and cleavage typically requires protein and both RNAs. However, single guide RNAs (“sgRNA”, or simply “gNRA”) can be engineered so as to incorporate aspects of both the crRNA and tracrRNA into a single RNA species. See, e.g., Jinek M., Chylinski K., Fonfara I., Hauer M., Doudna J. A., Charpentier E. Science 337:816-821(2012), the entire contents of which is hereby incorporated by reference. Cas9 recognizes a short motif in the CRISPR repeat sequences (the PAM or protospacer adjacent motif) to help distinguish self versus non-self. Cas9 nuclease sequences and structures are well known to those of skill in the art (see, e.g., “Complete genome sequence of an M1 strain of Streptococcus pyogenes.” Ferretti et al., J. J., McShan W. M., Ajdic D. J., Savic D. J., Savic G., Lyon K., Primeaux C., Sezate S., Suvorov A. N., Kenton S., Lai H. S., Lin S. P., Qian Y., Jia H. G., Najar F. Z., Ren Q., Zhu H., Song L., White J., Yuan X., Clifton S. W., Roe B. A., McLaughlin R. E., Proc. Natl. Acad. Sci. U.S.A. 98:4658-4663(2001); “CRISPR RNA maturation by trans-encoded small RNA and host factor RNase III.” Deltcheva E., Chylinski K., Sharma C. M., Gonzales K., Chao Y., Pirzada Z. A., Eckert M. R., Vogel J., Charpentier E., Nature 471:602-607(2011); and “A programmable dual-RNA-guided DNA endonuclease in adaptive bacterial immunity.” Jinek M., Chylinski K., Fonfara I., Hauer M., Doudna J. A., Charpentier E. Science 337:816-821(2012), the entire contents of each of which are incorporated herein by reference). Cas9 orthologs have been described in various species, including, but not limited to, S. pyogenes and S. thermophilus. Additional suitable Cas9 nucleases and sequences will be apparent to those of skill in the art based on this disclosure, and such Cas9 nucleases and sequences include Cas9 sequences from the organisms and loci disclosed in Chylinski, Rhun, and Charpentier, “The tracrRNA and Cas9 families of type II CRISPR-Cas immunity systems” (2013) RNA Biology 10:5, 726-737; the entire contents of which are incorporated herein by reference. In some embodiments, a Cas9 nuclease has an inactive (e.g., an inactivated) DNA cleavage domain, that is, the Cas9 is a nickase.

[0147] A nuclease-inactivated Cas9 protein may interchangeably be referred to as a “dCas9” protein (for nuclease-“dead” Cas9). Methods for generating a Cas9 protein (or a fragment thereof) having an inactive DNA cleavage domain are known (See, e.g., Jinek et al., Science. 337:816-821(2012); Qi et al., “Repurposing CRISPR as an RNA-Guided Platform for Sequence-Specific Control of Gene Expression” (2013) Cell. 28; 152(5):1173-83, the entire contents of each of which are incorporated herein by reference). For example, the DNA cleavage domain of Cas9 is known to include two subdomains, the HNH nuclease subdomain and the RuvC1 subdomain. The HNH subdomain cleaves the strand complementary to the gRNA, whereas the RuvC1 subdomain cleaves the non-complementary strand. Mutations within these subdomains can silence the nuclease activity of Cas9. For example, the mutations D10A and H840A completely inactivate the nuclease activity of S. pyogenes Cas9 (Jinek et al., Science. 337:816-821(2012); Qi et al., Cell. 28; 152(5):1173-83 (2013)). In some embodiments, proteins comprising fragments of Cas9 are provided. For example, in some embodiments, a protein comprises one of two Cas9 domains: (1) the gRNA binding domain of Cas9; or (2) the DNA cleavage domain of Cas9. In some embodiments, proteins comprising Cas9 or fragments thereof are referred to as “Cas9 variants.” A Cas9 variant shares homology to Cas9, or a fragment thereof. For example a Cas9 variant is at least about 70% identical, at least about 80% identical, at least about 90% identical, at least about 95% identical, at least about 96% identical, at least about 97% identical, at least about 98% identical, at least about 99% identical, at least about 99.5% identical, or at least about 99.9% identical to wild type Cas9. In some embodiments, the Cas9 variant may have 1, 2, 3, 4, 5, 6, 7, 8, 9, 10, 11, 12, 13, 14, 15, 16, 17, 18, 19, 20, 21, 22, 21, 24, 25, 26, 27, 28, 29, 30, 31, 32, 33, 34, 35, 36, 37, 38, 39, 40, 41, 42, 43, 44, 45, 46, 47, 48, 49, 50 or more amino acid changes compared to wild type Cas9. In some embodiments, the Cas9 variant comprises a fragment of Cas9 (e.g., a gRNA binding domain or a DNA-cleavage domain), such that the fragment is at least about 70% identical, at least about 80% identical, at least about 90% identical, at least about 95% identical, at least about 96% identical, at least about 97% identical, at least about 98% identical, at least about 99% identical, at least about 99.5% identical, or at least about 99.9% identical to the corresponding fragment of wild type Cas9. In some embodiments, the fragment is at least 30%, at least 35%, at least 40%, at least 45%, at least 50%, at least 55%, at least 60%, at least 65%, at least 70%, at least 75%, at least 80%, at least 85%, at least 90%, at least 95% identical, at least 96%, at least 97%, at least 98%, at least 99%, or at least 99.5% of the amino acid length of a corresponding wild type Cas9.

[0148] In some embodiments, the fragment is at least 100 amino acids in length. In some embodiments, the fragment is at least 100, 150, 200, 250, 300, 350, 400, 450, 500, 550, 600, 650, 700, 750, 800, 850, 900, 950, 1000, 1050, 1100, 1150, 1200, 1250, or at least 1300 amino acids in length. In some embodiments, wild type Cas9 corresponds to Cas9 from Streptococcus pyogenes (NCBI Reference Sequence: NC_017053.1, SEQ ID NO:1 (nucleotide); SEQ ID NO:2 (amino acid)).

(SEQ ID NO: 1)
ATGGATAAGAAATACTCAATAGGCTTAGATATCGGCACAAATAGC
GTCGGATGGGCGGTGATCACTGATGATTATAAGGTTCCGTCTAAA
AAGTTCAAGGTTCTGGGAAATACAGACCGCCACAGTATCAAAAAA
AATCTTATAGGGGCTCTTTTATTTGGCAGTGGAGAGACAGCGGAA
GCGACTCGTCTCAAACGGACAGCTCGTAGAAGGTATACACGTCGG
AAGAATCGTATTTGTTATCTACAGGAGATTTTTTCAAATGAGATG
GCGAAAGTAGATGATAGTTTCTTTCATCGACTTGAAGAGTCTTTT
TTGGTGGAAGAAGACAAGAAGCATGAACGTCATCCTATTTTTGGA
AATATAGTAGATGAAGTTGCTTATCATGAGAAATATCCAACTATC
TATCATCTGCGAAAAAAATTGGCAGATTCTACTGATAAAGCGGAT
TTGCGCTTAATCTATTTGGCCTTAGCGCATATGATTAAGTTTCGT
GGTCATTTTTTGATTGAGGGAGATTTAAATCCTGATAATAGTGAT
GTGGACAAACTATTTATCCAGTTGGTACAAATCTACAATCAATTA
TTTGAAGAAAACCCTATTAACGCAAGTAGAGTAGATGCTAAAGCG
ATTCTTTCTGCACGATTGAGTAAATCAAGACGATTAGAAAATCTC
ATTGCTCAGCTCCCCGGTGAGAAGAGAAATGGCTTGTTTGGGAAT
CTCATTGCTTTGTCATTGGGATTGACCCCTAATTTTAAATCAAAT
TTTGATTTGGCAGAAGATGCTAAATTACAGCTTTCAAAAGATACT
TACGATGATGATTTAGATAATTTATTGGCGCAAATTGGAGATCAA
TATGCTGATTTGTTTTTGGCAGCTAAGAATTTATCAGATGCTATT
TTACTTTCAGATATCCTAAGAGTAAATAGTGAAATAACTAAGGCT
CCCCTATCAGCTTCAATGATTAAGCGCTACGATGAACATCATCAA
GACTTGACTCTTTTAAAAGCTTTAGTTCGACAACAACTTCCAGAA
AAGTATAAAGAAATCTTTTTTGATCAATCAAAAAACGGATATGCA
GGTTATATTGATGGGGGAGCTAGCCAAGAAGAATTTTATAAATTT
ATCAAACCAATTTTAGAAAAAATGGATGGTACTGAGGAATTATTG
GTGAAACTAAATCGTGAAGATTTGCTGCGCAAGCAACGGACCTTT
GACAACGGCTCTATTCCCCATCAAATTCACTTGGGTGAGCTGCAT
GCTATTTTGAGAAGACAAGAAGACTTTTATCCATTTTTAAAAGAC
AATCGTGAGAAGATTGAAAAAATCTTGACTTTTCGAATTCCTTAT
TATGTTGGTCCATTGGCGCGTGGCAATAGTCGTTTTGCATGGATG
ACTCGGAAGTCTGAAGAAACAATTACCCCATGGAATTTTGAAGAA
GTTGTCGATAAAGGTGCTTCAGCTCAATCATTTATTGAACGCATG
ACAAACTTTGATAAAAATCTTCCAAATGAAAAAGTACTACCAAAA
CATAGTTTGCTTTATGAGTATTTTACGGTTTATAACGAATTGACA
AAGGTCAAATATGTTACTGAGGGAATGCGAAAACCAGCATTTCTT
TCAGGTGAACAGAAGAAAGCCATTGTTGATTTACTCTTCAAAACA
AATCGAAAAGTAACCGTTAAGCAATTAAAAGAAGATTATTTCAAA
AAAATAGAATGTTTTGATAGTGTTGAAATTTCAGGAGTTGAAGAT
AGATTTAATGCTTCATTAGGCGCCTACCATGATTTGCTAAAAATT
ATTAAAGATAAAGATTTTTTGGATAATGAAGAAAATGAAGATATC
TTAGAGGATATTGTTTTAACATTGACCTTATTTGAAGATAGGGGG
ATGATTGAGGAAAGACTTAAAACATATGCTCACCTCTTTGATGAT
AAGGTGATGAAACAGCTTAAACGTCGCCGTTATACTGGTTGGGGA
CGTTTGTCTCGAAAATTGATTAATGGTATTAGGGATAAGCAATCT
GGCAAAACAATATTAGATTTTTTGAAATCAGATGGTTTTGCCAAT
CGCAATTTTATGCAGCTGATCCATGATGATAGTTTGACATTTAAA
GAAGATATTCAAAAAGCACAGGTGTCTGGACAAGGCCATAGTTTA
CATGAACAGATTGCTAACTTAGCTGGCAGTCCTGCTATTAAAAAA
GGTATTTTACAGACTGTAAAAATTGTTGATGAACTGGTCAAAGTA
ATGGGGCATAAGCCAGAAAATATCGTTATTGAAATGGCACGTGAA
AATCAGACAACTCAAAAGGGCCAGAAAAATTCGCGAGAGCGTATG
AAACGAATCGAAGAAGGTATCAAAGAATTAGGAAGTCAGATTCTT
AAAGAGCATCCTGTTGAAAATACTCAATTGCAAAATGAAAAGCTC
TATCTCTATTATCTACAAAATGGAAGAGACATGTATGTGGACCAA
GAATTAGATATTAATCGTTTAAGTGATTATGATGTCGATCACATT
GTTCCACAAAGTTTCATTAAAGACGATTCAATAGACAATAAGGTA
CTAACGCGTTCTGATAAAAATCGTGGTAAATCGGATAACGTTCCA
AGTGAAGAAGTAGTCAAAAAGATGAAAAACTATTGGAGACAACTT
CTAAACGCCAAGTTAATCACTCAACGTAAGTTTGATAATTTAACG
AAAGCTGAACGTGGAGGTTTGAGTGAACTTGATAAAGCTGGTTTT
ATCAAACGCCAATTGGTTGAAACTCGCCAAATCACTAAGCATGTG
GCACAAATTTTGGATAGTCGCATGAATACTAAATACGATGAAAAT
GATAAACTTATTCGAGAGGTTAAAGTGATTACCTTAAAATCTAAA
TTAGTTTCTGACTTCCGAAAAGATTTCCAATTCTATAAAGTACGT
GAGATTAACAATTACCATCATGCCCATGATGCGTATCTAAATGCC
GTCGTTGGAACTGCTTTGATTAAGAAATATCCAAAACTTGAATCG
GAGTTTGTCTATGGTGATTATAAAGTTTATGATGTTCGTAAAATG
ATTGCTAAGTCTGAGCAAGAAATAGGCAAAGCAACCGCAAAATAT
TTCTTTTACTCTAATATCATGAACTTCTTCAAAACAGAAATTACA
CTTGCAAATGGAGAGATTCGCAAACGCCCTCTAATCGAAACTAAT
GGGGAAACTGGAGAAATTGTCTGGGATAAAGGGCGAGATTTTGCC
ACAGTGCGCAAAGTATTGTCCATGCCCCAAGTCAATATTGTCAAG
AAAACAGAAGTACAGACAGGCGGATTCTCCAAGGAGTCAATTTTA
CCAAAAAGAAATTCGGACAAGCTTATTGCTCGTAAAAAAGACTGG
GATCCAAAAAAATATGGTGGTTTTGATAGTCCAACGGTAGCTTAT
TCAGTCCTAGTGGTTGCTAAGGTGGAAAAAGGGAAATCGAAGAAG
TTAAAATCCGTTAAAGAGTTACTAGGGATCACAATTATGGAAAGA
AGTTCCTTTGAAAAAAATCCGATTGACTTTTTAGAAGCTAAAGGA
TATAAGGAAGTTAAAAAAGACTTAATCATTAAACTACCTAAATAT
AGTCTTTTTGAGTTAGAAAACGGTCGTAAACGGATGCTGGCTAGT
GCCGGAGAATTACAAAAAGGAAATGAGCTGGCTCTGCCAAGCAAA
TATGTGAATTTTTTATATTTAGCTAGTCATTATGAAAAGTTGAAG
GGTAGTCCAGAAGATAACGAACAAAAACAATTGTTTGTGGAGCAG
CATAAGCATTATTTAGATGAGATTATTGAGCAAATCAGTGAATTT
TCTAAGCGTGTTATTTTAGCAGATGCCAATTTAGATAAAGTTCTT
AGTGCATATAACAAACATAGAGACAAACCAATACGTGAACAAGCA
GAAAATATTATTCATTTATTTACGTTGACGAATCTTGGAGCTCCC
GCTGCTTTTAAATATTTTGATACAACAATTGATCGTAAACGATAT
ACGTCTACAAAAGAAGTTTTAGATGCCACTCTTATCCATCAATCC
ATCACTGGTCTTTATGAAACACGCATTGATTTGAGTCAGCTAGGA
GGTGACTGA
(SEQ ID NO: 2)
MDKKYSIGLDIGTNSVGWAVITDDYKVPSKKFKVLGNTDRHSIKK
NLIGALLFGSGETAEATRLKRTARRRYTRRKNRICYLQEIFSNEM
AKVDDSFFHRLEESFLVEEDKKHERHPIFGNIVDEVAYHEKYPTI
YHLRKKLADSTDKADLRLIYLALAHMIKFRGHFLIEGDLNPDNSD
VDKLFIQLVQIYNQLFEENPINASRVDAKAILSARLSKSRRLENL
IAQLPGEKRNGLFGNLIALSLGLTPNFKSNFDLAEDAKLQLSKDT
YDDDLDNLLAQIGDQYADLFLAAKNLSDAILLSDILRVNSEITKA
PLSASMIKRYDEHHQDLTLLKALVRQQLPEKYKEIFFDQSKNGYA
GYIDGGASQEEFYKFIKPILEKMDGTEELLVKLNREDLLRKQRTF
DNGSIPHQIHLGELHAILRRQEDFYPFLKDNREKIEKILTFRIPY
YVGPLARGNSRFAWMTRKSEETITPWNFEEVVDKGASAQSFIERM
TNFDKNLPNEKVLPKHSLLYEYFTVYNELTKVKYVTEGMRKPAFL
SGEQKKAIVDLLFKTNRKVTVKQLKEDYFKKIECFDSVEISGVED
RFNASLGAYHDLLKIIKDKDFLDNEENEDILEDIVLTLTLFEDRG
MIEERLKTYAHLFDDKVMKQLKRRRYTGWGRLSRKLINGIRDKQS
GKTILDFLKSDGFANRNFMQLIHDDSLTFKEDIQKAQVSGQGHSL
HEQIANLAGSPAIKKGILQTVKIVDELVKVMGHKPENIVIEMARE
NQTTQKGQKNSRERMKRIEEGIKELGSQILKEHPVENTQLQNEKL
YLYYLQNGRDMYVDQELDINRLSDYDVDHIVPQSFIKDDSIDNKV
LTRSDKNRGKSDNVPSEEVVKKMKNYWRQLLNAKLITQRKFDNLT
KAERGGLSELDKAGFIKRQLVETRQITKHVAQILDSRMNTKYDEN
DKLIREVKVITLKSKLVSDERKDFQFYKVREINNYHHAHDAYLNA
VVGTALIKKYPKLESEFVYGDYKVYDVRKMIAKSEQEIGKATAKY
FFYSNIMNFFKTEITLANGEIRKRPLIETNGETGEIVWDKGRDFA
TVRKVLSMPQVNIVKKTEVQTGGFSKESILPKRNSDKLIARKKDW
DPKKYGGFDSPTVAYSVLVVAKVEKGKSKKLKSVKELLGITIMER
SSFEKNPIDFLEAKGYKEVKKDLIIKLPKYSLFELENGRKRMLAS
AGELQKGNELALPSKYVNFLYLASHYEKLKGSPEDNEQKQLFVEQ
HKHYLDEIIEQISEFSKRVILADANLDKVLSAYNKHRDKPIREQA
ENIIHLFTLTNLGAPAAFKYFDTTIDRKRYTSTKEVLDATLIHQS
ITGLYETRIDLSQLGGD
(single underline: HNH domain;
double underline: RuvC domain)

[0149] In some embodiments, wild type Cas9 corresponds to, or comprises SEQ ID NO:3 (nucleotide) and/or SEQ ID NO: 4 (amino acid):

(SEQ ID NO: 3)
ATGGATAAAAAGTATTCTATTGGTTTAGACATCGGCACTAATTCC
GTTGGATGGGCTGTCATAACCGATGAATACAAAGTACCTTCAAAG
AAATTTAAGGTGTTGGGGAACACAGACCGTCATTCGATTAAAAAG
AATCTTATCGGTGCCCTCCTATTCGATAGTGGCGAAACGGCAGAG
GCGACTCGCCTGAAACGAACCGCTCGGAGAAGGTATACACGTCGC
AAGAACCGAATATGTTACTTACAAGAAATTTTTAGCAATGAGATG
GCCAAAGTTGACGATTCTTTCTTTCACCGTTTGGAAGAGTCCTTC
CTTGTCGAAGAGGACAAGAAACATGAACGGCACCCCATCTTTGGA
AACATAGTAGATGAGGTGGCATATCATGAAAAGTACCCAACGATT
TATCACCTCAGAAAAAAGCTAGTTGACTCAACTGATAAAGCGGAC
CTGAGGTTAATCTACTTGGCTCTTGCCCATATGATAAAGTTCCGT
GGGCACTTTCTCATTGAGGGTGATCTAAATCCGGACAACTCGGAT
GTCGACAAACTGTTCATCCAGTTAGTACAAACCTATAATCAGTTG
TTTGAAGAGAACCCTATAAATGCAAGTGGCGTGGATGCGAAGGCT
ATTCTTAGCGCCCGCCTCTCTAAATCCCGACGGCTAGAAAACCTG
ATCGCACAATTACCCGGAGAGAAGAAAAATGGGTTGTTCGGTAAC
CTTATAGCGCTCTCACTAGGCCTGACACCAAATTTTAAGTCGAAC
TTCGACTTAGCTGAAGATGCCAAATTGCAGCTTAGTAAGGACACG
TACGATGACGATCTCGACAATCTACTGGCACAAATTGGAGATCAG
TATGCGGACTTATTTTTGGCTGCCAAAAACCTTAGCGATGCAATC
CTCCTATCTGACATACTGAGAGTTAATACTGAGATTACCAAGGCG
CCGTTATCCGCTTCAATGATCAAAAGGTACGATGAACATCACCAA
GACTTGACACTTCTCAAGGCCCTAGTCCGTCAGCAACTGCCTGAG
AAATATAAGGAAATATTCTTTGATCAGTCGAAAAACGGGTACGCA
GGTTATATTGACGGCGGAGCGAGTCAAGAGGAATTCTACAAGTTT
ATCAAACCCATATTAGAGAAGATGGATGGGACGGAAGAGTTGCTT
GTAAAACTCAATCGCGAAGATCTACTGCGAAAGCAGCGGACTTTC
GACAACGGTAGCATTCCACATCAAATCCACTTAGGCGAATTGCAT
GCTATACTTAGAAGGCAGGAGGATTTTTATCCGTTCCTCAAAGAC
AATCGTGAAAAGATTGAGAAAATCCTAACCTTTCGCATACCTTAC
TATGTGGGACCCCTGGCCCGAGGGAACTCTCGGTTCGCATGGATG
ACAAGAAAGTCCGAAGAAACGATTACTCCATGGAATTTTGAGGAA
GTTGTCGATAAAGGTGCGTCAGCTCAATCGTTCATCGAGAGGATG
ACCAACTTTGACAAGAATTTACCGAACGAAAAAGTATTGCCTAAG
CACAGTTTACTTTACGAGTATTTCACAGTGTACAATGAACTCACG
AAAGTTAAGTATGTCACTGAGGGCATGCGTAAACCCGCCTTTCTA
AGCGGAGAACAGAAGAAAGCAATAGTAGATCTGTTATTCAAGACC
AACCGCAAAGTGACAGTTAAGCAATTGAAAGAGGACTACTTTAAG
AAAATTGAATGCTTCGATTCTGTCGAGATCTCCGGGGTAGAAGAT
CGATTTAATGCGTCACTTGGTACGTATCATGACCTCCTAAAGATA
ATTAAAGATAAGGACTTCCTGGATAACGAAGAGAATGAAGATATC
TTAGAAGATATAGTGTTGACTCTTACCCTCTTTGAAGATCGGGAA
ATGATTGAGGAAAGACTAAAAACATACGCTCACCTGTTCGACGAT
AAGGTTATGAAACAGTTAAAGAGGCGTCGCTATACGGGCTGGGGA
CGATTGTCGCGGAAACTTATCAACGGGATAAGAGACAAGCAAAGT
GGTAAAACTATTCTCGATTTTCTAAAGAGCGACGGCTTCGCCAAT
AGGAACTTTATGCAGCTGATCCATGATGACTCTTTAACCTTCAAA
GAGGATATACAAAAGGCACAGGTTTCCGGACAAGGGGACTCATTG
CACGAACATATTGCGAATCTTGCTGGTTCGCCAGCCATCAAAAAG
GGCATACTCCAGACAGTCAAAGTAGTGGATGAGCTAGTTAAGGTC
ATGGGACGTCACAAACCGGAAAACATTGTAATCGAGATGGCACGC
GAAAATCAAACGACTCAGAAGGGGCAAAAAAACAGTCGAGAGCGG
ATGAAGAGAATAGAAGAGGGTATTAAAGAACTGGGCAGCCAGATC
TTAAAGGAGCATCCTGTGGAAAATACCCAATTGCAGAACGAGAAA
CTTTACCTCTATTACCTACAAAATGGAAGGGACATGTATGTTGAT
CAGGAACTGGACATAAACCGTTTATCTGATTACGACGTCGATCAC
ATTGTACCCCAATCCTTTTTGAAGGACGATTCAATCGACAATAAA
GTGCTTACACGCTCGGATAAGAACCGAGGGAAAAGTGACAATGTT
CCAAGCGAGGAAGTCGTAAAGAAAATGAAGAACTATTGGCGGCAG
CTCCTAAATGCGAAACTGATAACGCAAAGAAAGTTCGATAACTTA
ACTAAAGCTGAGAGGGGGGCTTGTCTGAACTTGACAAGGCCGGAT
TTATTAAACGTCAGCTCGTGGAAACCCGCCAAATCACAAAGCATG
TTGCACAGATACTAGATTCCCGAATGAATACGAAATACGACGAGA
ACGATAAGCTGATTCGGGAAGTCAAAGTAATCACTTTAAAGTCAA
AATTGGTGTCGGACTTCAGAAAGGATTTTCAATTCTATAAAGTTA
GGGAGATAAATAACTACCACCATGCGCACGACGCTTATCTTAATG
CCGTCGTAGGGACCGCACTCATTAAGAAATACCCGAAGCTAGAAA
GTGAGTTTGTGTATGGTGATTACAAAGTTTATGACGTCCGTAAGA
TGATCGCGAAAAGCGAACAGGAGATAGGCAAGGCTACAGCCAAAT
ACTTCTTTTATTCTAACATTATGAATTTCTTTAAGACGGAAATCA
CTCTGGCAAACGGAGAGATACGCAAACGACCTTTAATTGAAACCA
ATGGGGAGACAGGTGAAATCGTATGGGATAAGGGCCGGGACTTCG
CGACGGTGAGAAAAGTTTTGTCCATGCCCCAAGTCAACATAGTAA
AGAAAACTGAGGTGCAGACCGGAGGGTTTTCAAAGGAATCGATTC
TTCCAAAAAGGAATAGTGATAAGCTCATCGCTCGTAAAAAGGACT
GGGACCCGAAAAAGTACGGTGGCTTCGATAGCCCTACAGTTGCCT
ATTCTGTCCTAGTAGTGGCAAAAGTTGAGAAGGGAAAATCCAAGA
AACTGAAGTCAGTCAAAGAATTATTGGGGATAACGATTATGGAGC
GCTCGTCTTTTGAAAAGAACCCCATCGACTTCCTTGAGGCGAAAG
GTTACAAGGAAGTAAAAAAGGATCTCATAATTAAACTACCAAAGT
ATAGTCTGTTTGAGTTAGAAAATGGCCGAAAACGGATGTTGGCTA
GCGCCGGAGAGCTTCAAAAGGGGAACGAACTCGCACTACCGTCTA
AATACGTGAATTTCCTGTATTTAGCGTCCCATTACGAGAAGTTGA
AAGGTTCACCTGAAGATAACGAACAGAAGCAACTTTTTGTTGAGC
AGCACAAACATTATCTCGACGAAATCATAGAGCAAATTTCGGAAT
TCAGTAAGAGAGTCATCCTAGCTGATGCCAATCTGGACAAAGTAT
TAAGCGCATACAACAAGCACAGGGATAAACCCATACGTGAGCAGG
CGGAAAATATTATCCATTTGTTTACTCTTACCAACCTCGGCGCTC
CAGCCGCATTCAAGTATTTTGACACAACGATAGATCGCAAACGAT
ACACTTCTACCAAGGAGGTGCTAGACGCGACACTGATTCACCAAT
CCATCACGGGATTATATGAAACTCGGATAGATTTGTCACAGCTTG
GGGGTGACGGATCCCCCAAGAAGAAGAGGAAAGTCTCGAGCGACT
ACAAAGACCATGACGGTGATTATAAAGATCATGACATCGATTACA
AGGATGACGATGACAAGGCTGCAGGA
(SEQ ID NO: 4)
MDKKYSIGLAIGTNSVGWAVITDEYKVPSKKFKVLGNTDRHSIKK
NLIGALLFDSGETAEATRLKRTARRRYTRRKNRICYLQEIFSNEM
AKVDDSFFHRLEESFLVEEDKKHERHPIFGNIVDEVAYHEKYPTI
YHLRKKLVDSTDKADLRLIYLALAHMIKFRGHFLIEGDLNPDNSD
VDKLFIQLVQTYNQLFEENPINASGVDAKAILSARLSKSRRLENL
IAQLPGEKKNGLFGNLIALSLGLTPNFKSNFDLAEDAKLQLSKDT
YDDDLDNLLAQIGDQYADLFLAAKNLSDAILLSDILRVNTEITKA
PLSASMIKRYDEHHQDLTLLKALVRQQLPEKYKEIFFDQSKNGYA
GYIDGGASQEEFYKFIKPILEKMDGTEELLVKLNREDLLRKQRTF
DNGSIPHQIHLGELHAILRRQEDFYPFLKDNREKIEKILTFRIPY
YVGPLARGNSRFAWMTRKSEETITPWNFEEVVDKGASAQSFIERM
TNFDKNLPNEKVLPKHSLLYEYFTVYNELTKVKYVTEGMRKPAFL
SGEQKKAIVDLLFKTNRKVTVKQLKEDYFKKIECFDSVEISGVED
RFNASLGTYHDLLKIIKDKDFLDNEENEDILEDIVLTLTLFEDRE
MIEERLKTYAHLFDDKVMKQLKRRRYTGWGRLSRKLINGIRDKQS
GKTILDFLKSDGFANRNFMQLIHDDSLTFKEDIQKAQVSGQGDSL
HEHIANLAGSPAIKKGILQTVKVVDELVKVMGRHKPENIVIEMAR
ENQTTQKGQKNSRERMKRIEEGIKELGSQILKEHPVENTQLQNEK
LYLYYLQNGRDMYVDQELDINRLSDYDVDHIVPQSFLKDDSIDNK
VLTRSDKNRGKSDNVPSEEVVKKMKNYWRQLLNAKLITQRKFDNL
TKAERGGLSELDKAGFIKRQLVETRQITKHVAQILDSRMNTKYDE
NDKLIREVKVITLKSKLVSDERKDFQFYKVREINNYHHAHDAYLN
AVVGTALIKKYPKLESEFVYGDYKVYDVRKMIAKSEQEIGKATAK
YFFYSNIMNFFKTEITLANGEIRKRPLIETNGETGEIVWDKGRDF
ATVRKVLSMPQVNIVKKTEVQTGGFSKESILPKRNSDKLIARKKD
WDPKKYGGFDSPTVAYSVLVVAKVEKGKSKKLKSVKELLGITIME
RSSFEKNPIDFLEAKGYKEVKKDLIIKLPKYSLFELENGRKRMLA
SAGELQKGNELALPSKYVNFLYLASHYEKLKGSPEDNEQKQLFVE
QHKHYLDEIIEQISEFSKRVILADANLDKVLSAYNKHRDKPIREQ
AENIIHLFTLTNLGAPAAFKYFDTTIDRKRYTSTKEVLDATLIHQ
SITGLYETRIDLSQLGGD
(single underline: HNH domain;
double underline: RuvC domain)

[0150] In some embodiments, wild type Cas9 corresponds to Cas9 from Streptococcus pyogenes (NCBI Reference Sequence: NC_002737.2, SEQ ID NO: 8 (nucleotide); and Uniport Reference Sequence: Q99ZW2, SEQ ID NO: 10 (amino acid).

(SEQ ID NO: 8)
ATGGATAAGAAATACTCAATAGGCTTAGATATCGGCACAAATAGC
GTCGGATGGGCGGTGATCACTGATGAATATAAGGTTCCGTCTAAA
AAGTTCAAGGTTCTGGGAAATACAGACCGCCACAGTATCAAAAAA
AATCTTATAGGGGCTCTTTTATTTGACAGTGGAGAGACAGCGGAA
GCGACTCGTCTCAAACGGACAGCTCGTAGAAGGTATACACGTCGG
AAGAATCGTATTTGTTATCTACAGGAGATTTTTTCAAATGAGATG
GCGAAAGTAGATGATAGTTTCTTTCATCGACTTGAAGAGTCTTTT
TTGGTGGAAGAAGACAAGAAGCATGAACGTCATCCTATTTTTGGA
AATATAGTAGATGAAGTTGCTTATCATGAGAAATATCCAACTATC
TATCATCTGCGAAAAAAATTGGTAGATTCTACTGATAAAGCGGAT
TTGCGCTTAATCTATTTGGCCTTAGCGCATATGATTAAGTTTCGT
GGTCATTTTTTGATTGAGGGAGATTTAAATCCTGATAATAGTGAT
GTGGACAAACTATTTATCCAGTTGGTACAAACCTACAATCAATTA
TTTGAAGAAAACCCTATTAACGCAAGTGGAGTAGATGCTAAAGCG
ATTCTTTCTGCACGATTGAGTAAATCAAGACGATTAGAAAATCTC
ATTGCTCAGCTCCCCGGTGAGAAGAAAAATGGCTTATTTGGGAAT
CTCATTGCTTTGTCATTGGGTTTGACCCCTAATTTTAAATCAAAT
TTTGATTTGGCAGAAGATGCTAAATTACAGCTTTCAAAAGATACT
TACGATGATGATTTAGATAATTTATTGGCGCAAATTGGAGATCAA
TATGCTGATTTGTTTTTGGCAGCTAAGAATTTATCAGATGCTATT
TTACTTTCAGATATCCTAAGAGTAAATACTGAAATAACTAAGGCT
CCCCTATCAGCTTCAATGATTAAACGCTACGATGAACATCATCAA
GACTTGACTCTTTTAAAAGCTTTAGTTCGACAACAACTTCCAGAA
AAGTATAAAGAAATCTTTTTTGATCAATCAAAAAACGGATATGCA
GGTTATATTGATGGGGGAGCTAGCCAAGAAGAATTTTATAAATTT
ATCAAACCAATTTTAGAAAAAATGGATGGTACTGAGGAATTATTG
GTGAAACTAAATCGTGAAGATTTGCTGCGCAAGCAACGGACCTTT
GACAACGGCTCTATTCCCCATCAAATTCACTTGGGTGAGCTGCAT
GCTATTTTGAGAAGACAAGAAGACTTTTATCCATTTTTAAAAGAC
AATCGTGAGAAGATTGAAAAAATCTTGACTTTTCGAATTCCTTAT
TATGTTGGTCCATTGGCGCGTGGCAATAGTCGTTTTGCATGGATG
ACTCGGAAGTCTGAAGAAACAATTACCCCATGGAATTTTGAAGAA
GTTGTCGATAAAGGTGCTTCAGCTCAATCATTTATTGAACGCATG
ACAAACTTTGATAAAAATCTTCCAAATGAAAAAGTACTACCAAAA
CATAGTTTGCTTTATGAGTATTTTACGGTTTATAACGAATTGACA
AAGGTCAAATATGTTACTGAAGGAATGCGAAAACCAGCATTTCTT
TCAGGTGAACAGAAGAAAGCCATTGTTGATTTACTCTTCAAAACA
AATCGAAAAGTAACCGTTAAGCAATTAAAAGAAGATTATTTCAAA
AAAATAGAATGTTTTGATAGTGTTGAAATTTCAGGAGTTGAAGAT
AGATTTAATGCTTCATTAGGTACCTACCATGATTTGCTAAAAATT
ATTAAAGATAAAGATTTTTTGGATAATGAAGAAAATGAAGATATC
TTAGAGGATATTGTTTTAACATTGACCTTATTTGAAGATAGGGAG
ATGATTGAGGAAAGACTTAAAACATATGCTCACCTCTTTGATGAT
AAGGTGATGAAACAGCTTAAACGTCGCCGTTATACTGGTTGGGGA
CGTTTGTCTCGAAAATTGATTAATGGTATTAGGGATAAGCAATCT
GGCAAAACAATATTAGATTTTTTGAAATCAGATGGTTTTGCCAAT
CGCAATTTTATGCAGCTGATCCATGATGATAGTTTGACATTTAAA
GAAGACATTCAAAAAGCACAAGTGTCTGGACAAGGCGATAGTTTA
CATGAACATATTGCAAATTTAGCTGGTAGCCCTGCTATTAAAAAA
GGTATTTTACAGACTGTAAAAGTTGTTGATGAATTGGTCAAAGTA
ATGGGGCGGCATAAGCCAGAAAATATCGTTATTGAAATGGCACGT
GAAAATCAGACAACTCAAAAGGGCCAGAAAAATTCGCGAGAGCGT
ATGAAACGAATCGAAGAAGGTATCAAAGAATTAGGAAGTCAGATT
CTTAAAGAGCATCCTGTTGAAAATACTCAATTGCAAAATGAAAAG
CTCTATCTCTATTATCTCCAAAATGGAAGAGACATGTATGTGGAC
CAAGAATTAGATATTAATCGTTTAAGTGATTATGATGTCGATCAC
ATTGTTCCACAAAGTTTCCTTAAAGACGATTCAATAGACAATAAG
GTCTTAACGCGTTCTGATAAAAATCGTGGTAAATCGGATAACGTT
CCAAGTGAAGAAGTAGTCAAAAAGATGAAAAACTATTGGAGACAA
CTTCTAAACGCCAAGTTAATCACTCAACGTAAGTTTGATAATTTA
ACGAAAGCTGAACGTGGAGGTTTGAGTGAACTTGATAAAGCTGGT
TTTATCAAACGCCAATTGGTTGAAACTCGCCAAATCACTAAGCAT
GTGGCACAAATTTTGGATAGTCGCATGAATACTAAATACGATGAA
AATGATAAACTTATTCGAGAGGTTAAAGTGATTACCTTAAAATCT
AAATTAGTTTCTGACTTCCGAAAAGATTTCCAATTCTATAAAGTA
CGTGAGATTAACAATTACCATCATGCCCATGATGCGTATCTAAAT
GCCGTCGTTGGAACTGCTTTGATTAAGAAATATCCAAAACTTGAA
TCGGAGTTTGTCTATGGTGATTATAAAGTTTATGATGTTCGTAAA
ATGATTGCTAAGTCTGAGCAAGAAATAGGCAAAGCAACCGCAAAA
TATTTCTTTTACTCTAATATCATGAACTTCTTCAAAACAGAAATT
ACACTTGCAAATGGAGAGATTCGCAAACGCCCTCTAATCGAAACT
AATGGGGAAACTGGAGAAATTGTCTGGGATAAAGGGCGAGATTTT
GCCACAGTGCGCAAAGTATTGTCCATGCCCCAAGTCAATATTGTC
AAGAAAACAGAAGTACAGACAGGCGGATTCTCCAAGGAGTCAATT
TTACCAAAAAGAAATTCGGACAAGCTTATTGCTCGTAAAAAAGAC
TGGGATCCAAAAAAATATGGTGGTTTTGATAGTCCAACGGTAGCT
TATTCAGTCCTAGTGGTTGCTAAGGTGGAAAAAGGGAAATCGAAG
AAGTTAAAATCCGTTAAAGAGTTACTAGGGATCACAATTATGGAA
AGAAGTTCCTTTGAAAAAAATCCGATTGACTTTTTAGAAGCTAAA
GGATATAAGGAAGTTAAAAAAGACTTAATCATTAAACTACCTAAA
TATAGTCTTTTTGAGTTAGAAAACGGTCGTAAACGGATGCTGGCT
AGTGCCGGAGAATTACAAAAAGGAAATGAGCTGGCTCTGCCAAGC
AAATATGTGAATTTTTTATATTTAGCTAGTCATTATGAAAAGTTG
AAGGGTAGTCCAGAAGATAACGAACAAAAACAATTGTTTGTGGAG
CAGCATAAGCATTATTTAGATGAGATTATTGAGCAAATCAGTGAA
TTTTCTAAGCGTGTTATTTTAGCAGATGCCAATTTAGATAAAGTT
CTTAGTGCATATAACAAACATAGAGACAAACCAATACGTGAACAA
GCAGAAAATATTATTCATTTATTTACGTTGACGAATCTTGGAGCT
CCCGCTGCTTTTAAATATTTTGATACAACAATTGATCGTAAACGA
TATACGTCTACAAAAGAAGTTTTAGATGCCACTCTTATCCATCAA
TCCATCACTGGTCTTTATGAAACACGCATTGATTTGAGTCAGCTA
GGAGGTGACTGA
(SEQ ID NO: 10)
MDKKYSIGLDIGTNSVGWAVITDEYKVPSKKFKVLGNTDRHSIKK
NLIGALLEDSGETAEATRLKRTARRRYTRRKNRICYLQEIFSNEM
AKVDDSFFHRLEESFLVEEDKKHERHPIFGNIVDEVAYHEKYPTI
YHLRKKLVDSTDKADLRLIYLALAHMIKFRGHFLIEGDLNPDNSD
VDKLFIQLVQTYNQLFEENPINASGVDAKAILSARLSKSRRLENL
IAQLPGEKKNGLFGNLIALSLGLTPNFKSNFDLAEDAKLQLSKDT
YDDDLDNLLAQIGDQYADLFLAAKNLSDAILLSDILRVNTEITKA
PLSASMIKRYDEHHQDLTLLKALVRQQLPEKYKEIFFDQSKNGYA
GYIDGGASQEEFYKFIKPILEKMDGTEELLVKLNREDLLRKQRTF
DNGSIPHQIHLGELHAILRRQEDFYPFLKDNREKIEKILTFRIPY
YVGPLARGNSRFAWMTRKSEETITPWNFEEVVDKGASAQSFIERM
TNFDKNLPNEKVLPKHSLLYEYFTVYNELTKVKYVTEGMRKPAFL
SGEQKKAIVDLLFKTNRKVTVKQLKEDYFKKIECFDSVEISGVED
RFNASLGTYHDLLKIIKDKDFLDNEENEDILEDIVLTLTLFEDRE
MIEERLKTYAHLFDDKVMKQLKRRRYTGWGRLSRKLINGIRDKQS
GKTILDFLKSDGFANRNFMQLIHDDSLTFKEDIQKAQVSGQGDSL
HEHIANLAGSPAIKKGILQTVKVVDELVKVMGRHKPENIVIEMAR
ENQTTQKGQKNSRERMKRIEEGIKELGSQILKEHPVENTQLQNEK
LYLYYLQNGRDMYVDQELDINRLSDYDVDHIVPQSFLKDDSIDNK
VLTRSDKNRGKSDNVPSEEVVKKMKNYWRQLLNAKLITQRKFDNL
TKAERGGLSELDKAGFIKRQLVETRQITKHVAQILDSRMNTKYDE
NDKLIREVKVITLKSKLVSDERKDFQFYKVREINNYHHAHDAYLN
AVVGTALIKKYPKLESEFVYGDYKVYDVRKMIAKSEQEIGKATAK
YFFYSNIMNFFKTEITLANGEIRKRPLIETNGETGEIVWDKGRDF
ATVRKVLSMPQVNIVKKTEVQTGGFSKESILPKRNSDKLIARKKD
WDPKKYGGFDSPTVAYSVLVVAKVEKGKSKKLKSVKELLGITIME
RSSFEKNPIDFLEAKGYKEVKKDLIIKLPKYSLFELENGRKRMLA
SAGELQKGNELALPSKYVNFLYLASHYEKLKGSPEDNEQKQLFVE
QHKHYLDEIIEQISEFSKRVILADANLDKVLSAYNKHRDKPIREQ
AENIIHLFTLTNLGAPAAFKYFDTTIDRKRYTSTKEVLDATLIHQ
SITGLYETRIDLSQLGGD
(single underline: HNH domain;
double underline: RuvC domain)

[0151] In some embodiments, Cas9 refers to Cas9 from: Corynebacterium ulcerans (NCBI Refs: NC_015683.1, NC_017317.1); Corynebacterium diphtheria (NCBI Refs: NC_016782.1, NC_016786.1); Spiroplasma syrphidicola (NCBI Ref: NC_021284.1); Prevotella intermedia (NCBI Ref: NC_017861.1); Spiroplasma taiwanense (NCBI Ref: NC_021846.1); Streptococcus iniae (NCBI Ref: NC_021314.1); Belliella baltica (NCBI Ref: NC_018010.1); Psychroflexus torquisI (NCBI Ref: NC_018721.1); Streptococcus thermophilus (NCBI Ref: YP_820832.1), Listeria innocua (NCBI Ref: NP_472073.1), Campylobacter jejuni (NCBI Ref: YP_002344900.1) or Neisseria. meningitidis (NCBI Ref: YP_002342100.1) or to a Cas9 from any of the organisms listed in Example 5.

[0152] In some embodiments, dCas9 corresponds to, or comprises in part or in whole, a Cas9 amino acid sequence having one or more mutations that inactivate the Cas9 nuclease activity. For example, in some embodiments, a dCas9 domain comprises D10A and/or H840A mutation.

dCas9 (D10A and H840A):

(SEQ ID NO: 9)
MDKKYSIGLAIGTNSVGWAVITDEYKVPSKKFKVLGNTDRHSIKKNLIGALLFDSGE
TAEATRLKRTARRRYTRRKNRICYLQEIFSNEMAKVDDSFFHRLEESFLVEEDKKHERHPI
FGNIVDEVAYHEKYPTIYHLRKKLVDSTDKADLRLIYLALAHMIKFRGHFLIEGDLNPDN
SDVDKLFIQLVQTYNQLFEENPINASGVDAKAILSARLSKSRRLENLIAQLPGEKKNGLFG
NLIALSLGLTPNFKSNFDLAEDAKLQLSKDTYDDDLDNLLAQIGDQYADLFLAAKNLSD
AILLSDILRVNTEITKAPLSASMIKRYDEHHQDLTLLKALVRQQLPEKYKEIFFDQSKNGY
AGYIDGGASQEEFYKFIKPILEKMDGTEELLVKLNREDLLRKQRTFDNGSIPHQIHLGELH
AILRRQEDFYPFLKDNREKIEKILTFRIPYYVGPLARGNSRFAWMTRKSEETITPWNFEEV
VDKGASAQSFIERMTNFDKNLPNEKVLPKHSLLYEYFTVYNELTKVKYVTEGMRKPAFL
SGEQKKAIVDLLFKTNRKVTVKQLKEDYFKKIECFDSVEISGVEDRFNASLGTYHDLLKII
KDKDFLDNEENEDILEDIVLTLTLFEDREMIEERLKTYAHLFDDKVMKQLKRRRYTGWG

[chemical structure]

[chemical structure]

MKRIEEGIKELGSQILKEHPVENTQLQNEKLYLYYLONGRDMYVDQELDINRLSDY
DVDAIVPQSFLKDDSIDNKVLTRSDKNRGKSDNVPSEEVVKKMKNYWROLLNAKLI

[chemical structure]

[chemical structure]

[chemical structure]

[chemical structure]

YGGFDSPTVAYSVLVVAKVEKGKSKKLKSVKELLGITIMERSSFEKNPIDFLEAKGYKEV
KKDLIIKLPKYSLFELENGRKRMLASAGELQKGNELALPSKYVNFLYLASHYEKLKGSPE
DNEQKQLFVEQHKHYLDEIIEQISEFSKRVILADANLDKVLSAYNKHRDKPIREQAENIIH
LFTLTNLGAPAAFKYFDTTIDRKRYTSTKEVLDATLIHQSITGLYETRIDLSQLGGD
(single underline: HNH domain; double underline: RuvC domain).

[0153] In some embodiments, the Cas9 domain comprises a D10A mutation, while the residue at position 840 remains a histidine in the amino acid sequence provided in SEQ ID NO: 10, or at corresponding positions in any of the amino acid sequences provided in SEQ ID NOs: 11-260. Without wishing to be bound by any particular theory, the presence of the catalytic residue H840 restores the activity of the Cas9 to cleave the non-edited (e.g., non-deaminated) strand containing a G opposite the targeted C. Restoration of H840 (e.g., from A840) does not result in the cleavage of the target strand containing the C. Such Cas9 variants are able to generate a single-strand DNA break (nick) at a specific location based on the gRNA-defined target sequence, leading to repair of the non-edited strand, ultimately resulting in a G to A change on the non-edited strand. A schematic representation of this process is shown in FIG. 108. Briefly, the C of a C-G basepair can be deaminated to a U by a deaminase, e.g., an APOBEC deamonase. Nicking the non-edited strand, having the G, facilitates removal of the G via mismatch repair mechanisms. UGI inhibits UDG, which prevents removal of the U.

[0154] In other embodiments, dCas9 variants having mutations other than D10A and H840A are provided, which, e.g., result in nuclease inactivated Cas9 (dCas9). Such mutations, by way of example, include other amino acid substitutions at D10 and H820, or other substitutions within the nuclease domains of Cas9 (e.g., substitutions in the HNH nuclease subdomain and/or the RuvC1 subdomain). In some embodiments, variants or homologues of dCas9 (e.g., variants of SEQ ID NO: 10) are provided which are at least about 70% identical, at least about 80% identical, at least about 90% identical, at least about 95% identical, at least about 98% identical, at least about 99% identical, at least about 99.5% identical, or at least about 99.9% identical to SEQ ID NO: 10. In some embodiments, variants of dCas9 (e.g., variants of SEQ ID NO: 10) are provided having amino acid sequences which are shorter, or longer than SEQ ID NO: 10, by about 5 amino acids, by about 10 amino acids, by about 15 amino acids, by about 20 amino acids, by about 25 amino acids, by about 30 amino acids, by about 40 amino acids, by about 50 amino acids, by about 75 amino acids, by about 100 amino acids or more.

[0155] In some embodiments, Cas9 fusion proteins as provided herein comprise the full-length amino acid sequence of a Cas9 protein, e.g., one of the Cas9 sequences provided herein. In other embodiments, however, fusion proteins as provided herein do not comprise a full-length Cas9 sequence, but only a fragment thereof. For example, in some embodiments, a Cas9 fusion protein provided herein comprises a Cas9 fragment, wherein the fragment binds crRNA and tracrRNA or sgRNA, but does not comprise a functional nuclease domain, e.g., in that it comprises only a truncated version of a nuclease domain or no nuclease domain at all. Exemplary amino acid sequences of suitable Cas9 domains and Cas9 fragments are provided herein, and additional suitable sequences of Cas9 domains and fragments will be apparent to those of skill in the art.

[0156] In some embodiments, Cas9 refers to Cas9 from: Corynebacterium ulcerans (NCBI Refs: NC_015683.1, NC_017317.1); Corynebacterium diphtheria (NCBI Refs: NC_016782.1, NC_016786.1); Spiroplasma syrphidicola (NCBI Ref: NC_021284.1); Prevotella intermedia (NCBI Ref: NC_017861.1); Spiroplasma taiwanense (NCBI Ref: NC_021846.1); Streptococcus iniae (NCBI Ref: NC_021314.1); Belliella baltica (NCBI Ref: NC_018010.1); Psychroflexus torquisI (NCBI Ref: NC_018721.1); Streptococcus thermophilus (NCBI Ref: YP_820832.1); Listeria innocua (NCBI Ref: NP_472073.1); Campylobacter jejuni (NCBI Ref: YP_002344900.1); or Neisseria. meningitidis (NCBI Ref: YP_002342100.1).

[0157] The term “deaminase” or “deaminase domain,” as used herein, refers to a protein or enzyme that catalyzes a deamination reaction. In some embodiments, the deaminase or deaminase domain is a cytidine deaminase, catalyzing the hydrolytic deamination of cytidine or deoxycytidine to uridine or deoxyuridine, respectively. In some embodiments, the deaminase or deaminase domain is a cytidine deaminase domain, catalyzing the hydrolytic deamination of cytosine to uracil. In some embodiments, the deaminase or deaminase domain is a naturally-occurring deaminase from an organism, such as a human, chimpanzee, gorilla, monkey, cow, dog, rat, or mouse. In some embodiments, the deaminase or deaminase domain is a variant of a naturally-occurring deaminase from an organism, that does not occur in nature. For example, in some embodiments, the deaminase or deaminase domain is at least 50%, at least 55%, at least 60%, at least 65%, at least 70%, at least 75% at least 80%, at least 85%, at least 90%, at least 95%, at least 96%, at least 97%, at least 98%, at least 99%, or at least 99.5% identical to a naturally-occurring deaminase from an organism.

[0158] The term “effective amount,” as used herein, refers to an amount of a biologically active agent that is sufficient to elicit a desired biological response. For example, in some embodiments, an effective amount of a nuclease may refer to the amount of the nuclease that is sufficient to induce cleavage of a target site specifically bound and cleaved by the nuclease. In some embodiments, an effective amount of a fusion protein provided herein, e.g., of a fusion protein comprising a nuclease-inactive Cas9 domain and a nucleic acid editing domain (e.g., a deaminase domain) may refer to the amount of the fusion protein that is sufficient to induce editing of a target site specifically bound and edited by the fusion protein. As will be appreciated by the skilled artisan, the effective amount of an agent, e.g., a fusion protein, a nuclease, a deaminase, a recombinase, a hybrid protein, a protein dimer, a complex of a protein (or protein dimer) and a polynucleotide, or a polynucleotide, may vary depending on various factors as, for example, on the desired biological response, e.g., on the specific allele, genome, or target site to be edited, on the cell or tissue being targeted, and on the agent being used.

[0159] The term “linker,” as used herein, refers to a chemical group or a molecule linking two molecules or moieties, e.g., two domains of a fusion protein, such as, for example, a nuclease-inactive Cas9 domain and a nucleic acid editing domain (e.g., a deaminase domain). In some embodiments, a linker joins a gRNA binding domain of an RNA-programmable nuclease, including a Cas9 nuclease domain, and the catalytic domain of a nucleic-acid editing protein. In some embodiments, a linker joins a dCas9 and a nucleic-acid editing protein. Typically, the linker is positioned between, or flanked by, two groups, molecules, or other moieties and connected to each one via a covalent bond, thus connecting the two. In some embodiments, the linker is an amino acid or a plurality of amino acids (e.g., a peptide or protein). In some embodiments, the linker is an organic molecule, group, polymer, or chemical moiety. In some embodiments, the linker is 5-100 amino acids in length, for example, 5, 6, 7, 8, 9, 10, 11, 12, 13, 14, 15, 16, 17, 18, 19, 20, 21, 22, 23, 24, 25, 26, 27, 28, 29, 30, 30-35, 35-40, 40-45, 45-50, 50-60, 60-70, 70-80, 80-90, 90-100, 100-150, or 150-200 amino acids in length. Longer or shorter linkers are also contemplated.

[0160] The term “mutation,” as used herein, refers to a substitution of a residue within a sequence, e.g., a nucleic acid or amino acid sequence, with another residue, or a deletion or insertion of one or more residues within a sequence. Mutations are typically described herein by identifying the original residue followed by the position of the residue within the sequence and by the identity of the newly substituted residue. Various methods for making the amino acid substitutions (mutations) provided herein are well known in the art, and are provided by, for example, Green and Sambrook, Molecular Cloning: A Laboratory Manual (4^{th} ed., Cold Spring Harbor Laboratory Press, Cold Spring Harbor, N.Y. (2012)).

[0161] The terms “nucleic acid” and “nucleic acid molecule,” as used herein, refer to a compound comprising a nucleobase and an acidic moiety, e.g., a nucleoside, a nucleotide, or a polymer of nucleotides. Typically, polymeric nucleic acids, e.g., nucleic acid molecules comprising three or more nucleotides are linear molecules, in which adjacent nucleotides are linked to each other via a phosphodiester linkage. In some embodiments, “nucleic acid” refers to individual nucleic acid residues (e.g. nucleotides and/or nucleosides). In some embodiments, “nucleic acid” refers to an oligonucleotide chain comprising three or more individual nucleotide residues. As used herein, the terms “oligonucleotide” and “polynucleotide” can be used interchangeably to refer to a polymer of nucleotides (e.g., a string of at least three nucleotides). In some embodiments, “nucleic acid” encompasses RNA as well as single and/or double-stranded DNA. Nucleic acids may be naturally occurring, for example, in the context of a genome, a transcript, an mRNA, tRNA, rRNA, siRNA, snRNA, a plasmid, cosmid, chromosome, chromatid, or other naturally occurring nucleic acid molecule. On the other hand, a nucleic acid molecule may be a non-naturally occurring molecule, e.g., a recombinant DNA or RNA, an artificial chromosome, an engineered genome, or fragment thereof, or a synthetic DNA, RNA, DNA/RNA hybrid, or including non-naturally occurring nucleotides or nucleosides. Furthermore, the terms “nucleic acid,” “DNA,” “RNA,” and/or similar terms include nucleic acid analogs, e.g., analogs having other than a phosphodiester backbone. Nucleic acids can be purified from natural sources, produced using recombinant expression systems and optionally purified, chemically synthesized, etc. Where appropriate, e.g., in the case of chemically synthesized molecules, nucleic acids can comprise nucleoside analogs such as analogs having chemically modified bases or sugars, and backbone modifications. A nucleic acid sequence is presented in the 5′ to 3′ direction unless otherwise indicated. In some embodiments, a nucleic acid is or comprises natural nucleosides (e.g. adenosine, thymidine, guanosine, cytidine, uridine, deoxyadenosine, deoxythymidine, deoxyguanosine, and deoxycytidine); nucleoside analogs (e.g., 2-aminoadenosine, 2-thiothymidine, inosine, pyrrolo-pyrimidine, 3-methyl adenosine, 5-methylcytidine, 2-aminoadenosine, C5-bromouridine, C5-fluorouridine, C5-iodouridine, C5-propynyl-uridine, C5-propynyl-cytidine, C5-methylcytidine, 2-aminoadenosine, 7-deazaadenosine, 7-deazaguanosine, 8-oxoadenosine, 8-oxoguanosine, O(6)-methylguanine, and 2-thiocytidine); chemically modified bases; biologically modified bases (e.g., methylated bases); intercalated bases; modified sugars (e.g., 2′-fluororibose, ribose, 2′-deoxyribose, arabinose, and hexose); and/or modified phosphate groups (e.g., phosphorothioates and 5′-N-phosphoramidite linkages).

[0162] The term “nucleic acid editing domain,” as used herein refers to a protein or enzyme capable of making one or more modifications (e.g., deamination of a cytidine residue) to a nucleic acid (e.g., DNA or RNA). Exemplary nucleic acid editing domains include, but are not limited to a deaminase, a nuclease, a nickase, a recombinase, a methyltransferase, a methylase, an acetylase, an acetyltransferase, a transcriptional activator, or a transcriptional repressor domain. In some embodiments the nucleic acid editing domain is a deaminase (e.g., a cytidine deaminase, such as an APOBEC or an AID deaminase).

[0163] The term “proliferative disease,” as used herein, refers to any disease in which cell or tissue homeostasis is disturbed in that a cell or cell population exhibits an abnormally elevated proliferation rate. Proliferative diseases include hyperproliferative diseases, such as pre-neoplastic hyperplastic conditions and neoplastic diseases. Neoplastic diseases are characterized by an abnormal proliferation of cells and include both benign and malignant neoplasias. Malignant neoplasia is also referred to as cancer.

[0164] The terms “protein,” “peptide,” and “polypeptide” are used interchangeably herein, and refer to a polymer of amino acid residues linked together by peptide (amide) bonds. The terms refer to a protein, peptide, or polypeptide of any size, structure, or function. Typically, a protein, peptide, or polypeptide will be at least three amino acids long. A protein, peptide, or polypeptide may refer to an individual protein or a collection of proteins. One or more of the amino acids in a protein, peptide, or polypeptide may be modified, for example, by the addition of a chemical entity such as a carbohydrate group, a hydroxyl group, a phosphate group, a farnesyl group, an isofarnesyl group, a fatty acid group, a linker for conjugation, functionalization, or other modification, etc. A protein, peptide, or polypeptide may also be a single molecule or may be a multi-molecular complex. A protein, peptide, or polypeptide may be just a fragment of a naturally occurring protein or peptide. A protein, peptide, or polypeptide may be naturally occurring, recombinant, or synthetic, or any combination thereof. The term “fusion protein” as used herein refers to a hybrid polypeptide which comprises protein domains from at least two different proteins. One protein may be located at the amino-terminal (N-terminal) portion of the fusion protein or at the carboxy-terminal (C-terminal) protein thus forming an “amino-terminal fusion protein” or a “carboxy-terminal fusion protein,” respectively. A protein may comprise different domains, for example, a nucleic acid binding domain (e.g., the gRNA binding domain of Cas9 that directs the binding of the protein to a target site) and a nucleic acid cleavage domain or a catalytic domain of a nucleic-acid editing protein. In some embodiments, a protein comprises a proteinaceous part, e.g., an amino acid sequence constituting a nucleic acid binding domain, and an organic compound, e.g., a compound that can act as a nucleic acid cleavage agent. In some embodiments, a protein is in a complex with, or is in association with, a nucleic acid, e.g., RNA. Any of the proteins provided herein may be produced by any method known in the art. For example, the proteins provided herein may be produced via recombinant protein expression and purification, which is especially suited for fusion proteins comprising a peptide linker. Methods for recombinant protein expression and purification are well known, and include those described by Green and Sambrook, Molecular Cloning: A Laboratory Manual (4^{th} ed., Cold Spring Harbor Laboratory Press, Cold Spring Harbor, N.Y. (2012)), the entire contents of which are incorporated herein by reference.

[0165] The term “RNA-programmable nuclease,” and “RNA-guided nuclease” are used interchangeably herein and refer to a nuclease that forms a complex with (e.g., binds or associates with) one or more RNA that is not a target for cleavage. In some embodiments, an RNA-programmable nuclease, when in a complex with an RNA, may be referred to as a nuclease:RNA complex. Typically, the bound RNA(s) is referred to as a guide RNA (gRNA). gRNAs can exist as a complex of two or more RNAs, or as a single RNA molecule. gRNAs that exist as a single RNA molecule may be referred to as single-guide RNAs (sgRNAs), though “gRNA” is used interchangeably to refer to guide RNAs that exist as either single molecules or as a complex of two or more molecules. Typically, gRNAs that exist as single RNA species comprise two domains: (1) a domain that shares homology to a target nucleic acid (e.g., and directs binding of a Cas9 complex to the target); and (2) a domain that binds a Cas9 protein. In some embodiments, domain (2) corresponds to a sequence known as a tracrRNA, and comprises a stem-loop structure. For example, in some embodiments, domain (2) is identical or homologous to a tracrRNA as provided in Jinek et al., Science 337:816-821(2012), the entire contents of which is incorporated herein by reference. Other examples of gRNAs (e.g., those including domain 2) can be found in U.S. Provisional Patent Application Ser. No. 61/874,682, filed Sep. 6, 2013, entitled “Switchable Cas9 Nucleases And Uses Thereof,” and U.S. Provisional Patent Application Ser. No. 61/874,746, filed Sep. 6, 2013, entitled “Delivery System For Functional Nucleases,” the entire contents of each are hereby incorporated by reference in their entirety. In some embodiments, a gRNA comprises two or more of domains (1) and (2), and may be referred to as an “extended gRNA.” For example, an extended gRNA will, e.g., bind two or more Cas9 proteins and bind a target nucleic acid at two or more distinct regions, as described herein. The gRNA comprises a nucleotide sequence that complements a target site, which mediates binding of the nuclease/RNA complex to said target site, providing the sequence specificity of the nuclease:RNA complex. In some embodiments, the RNA-programmable nuclease is the (CRISPR-associated system) Cas9 endonuclease, for example Cas9 (Csn1) from Streptococcus pyogenes (see, e.g., “Complete genome sequence of an M1 strain of Streptococcus pyogenes.” Ferretti J. J., McShan W. M., Ajdic D. J., Savic D. J., Savic G., Lyon K., Primeaux C., Sezate S., Suvorov A. N., Kenton S., Lai H. S., Lin S. P., Qian Y., Jia H. G., Najar F. Z., Ren Q., Zhu H., Song L., White J., Yuan X., Clifton S. W., Roe B. A., McLaughlin R. E., Proc. Natl. Acad. Sci. U.S.A. 98:4658-4663(2001); “CRISPR RNA maturation by trans-encoded small RNA and host factor RNase III.” Deltcheva E., Chylinski K., Sharma C. M., Gonzales K., Chao Y., Pirzada Z. A., Eckert M. R., Vogel J., Charpentier E., Nature 471:602-607(2011); and “A programmable dual-RNA-guided DNA endonuclease in adaptive bacterial immunity.” Jinek M., Chylinski K., Fonfara I., Hauer M., Doudna J. A., Charpentier E. Science 337:816-821(2012), the entire contents of each of which are incorporated herein by reference.

[0166] Because RNA-programmable nucleases (e.g., Cas9) use RNA:DNA hybridization to target DNA cleavage sites, these proteins are able to be targeted, in principle, to any sequence specified by the guide RNA. Methods of using RNA-programmable nucleases, such as Cas9, for site-specific cleavage (e.g., to modify a genome) are known in the art (see e.g., Cong, L. et al. Multiplex genome engineering using CRISPR/Cas systems. Science 339, 819-823 (2013); Mali, P. et al. RNA-guided human genome engineering via Cas9. Science 339, 823-826 (2013); Hwang, W. Y. et al. Efficient genome editing in zebrafish using a CRISPR-Cas system. Nature biotechnology 31, 227-229 (2013); Jinek, M. et al. RNA-programmed genome editing in human cells. eLife 2, e00471 (2013); Dicarlo, J. E. et al. Genome engineering in Saccharomyces cerevisiae using CRISPR-Cas systems. Nucleic acids research (2013); Jiang, W. et al. RNA-guided editing of bacterial genomes using CRISPR-Cas systems. Nature biotechnology 31, 233-239 (2013); the entire contents of each of which are incorporated herein by reference).

[0167] The term “subject,” as used herein, refers to an individual organism, for example, an individual mammal. In some embodiments, the subject is a human. In some embodiments, the subject is a non-human mammal. In some embodiments, the subject is a non-human primate. In some embodiments, the subject is a rodent. In some embodiments, the subject is a sheep, a goat, a cattle, a cat, or a dog. In some embodiments, the subject is a vertebrate, an amphibian, a reptile, a fish, an insect, a fly, or a nematode. In some embodiments, the subject is a research animal. In some embodiments, the subject is genetically engineered, e.g., a genetically engineered non-human subject. The subject may be of either sex and at any stage of development.

[0168] The term “target site” refers to a sequence within a nucleic acid molecule that is deaminated by a deaminase or a fusion protein comprising a deaminase, (e.g., a dCas9-deaminase fusion protein provided herein).

[0169] The terms “treatment,” “treat,” and “treating,” refer to a clinical intervention aimed to reverse, alleviate, delay the onset of, or inhibit the progress of a disease or disorder, or one or more symptoms thereof, as described herein. As used herein, the terms “treatment,” “treat,” and “treating” refer to a clinical intervention aimed to reverse, alleviate, delay the onset of, or inhibit the progress of a disease or disorder, or one or more symptoms thereof, as described herein. In some embodiments, treatment may be administered after one or more symptoms have developed and/or after a disease has been diagnosed. In other embodiments, treatment may be administered in the absence of symptoms, e.g., to prevent or delay onset of a symptom or inhibit onset or progression of a disease. For example, treatment may be administered to a susceptible individual prior to the onset of symptoms (e.g., in light of a history of symptoms and/or in light of genetic or other susceptibility factors). Treatment may also be continued after symptoms have resolved, for example, to prevent or delay their recurrence.

[0170] The term “recombinant” as used herein in the context of proteins or nucleic acids refers to proteins or nucleic acids that do not occur in nature, but are the product of human engineering. For example, in some embodiments, a recombinant protein or nucleic acid molecule comprises an amino acid or nucleotide sequence that comprises at least one, at least two, at least three, at least four, at least five, at least six, or at least seven mutations as compared to any naturally occurring sequence.

[0171] The term “nucleobase editors (NBEs)” or “base editors (BEs),” as used herein, refers to the Cas9 fusion proteins described herein. In some embodiments, the fusion protein comprises a nuclease-inactive Cas9 (dCas9) fused to a deaminase. In some embodiments, the fusion protein comprises a Cas9 nickase fused to a deaminase. In some embodiments, the fusion protein comprises a nuclease-inactive Cas9 fused to a deaminase and further fused to a UGI domain. In some embodiments, the fusion protein comprises a Cas9 nickase fused to a deaminase and further fused to a UGI domain. In some embodiments, the dCas9 of the fusion protein comprises a D10A and a H840A mutation of SEQ ID NO: 10, or a corresponding mutation in any of SEQ ID NOs: 11-260, which inactivates nuclease activity of the Cas9 protein. In some embodiments, the fusion protein comprises a D10A mutation and comprises a histidine at residue 840 of SEQ ID NO: 10, or a corresponding mutation in any of SEQ ID NOs: 11-260, which renders Cas9 capable of cleaving only one strand of a nucleic acid duplex. An example of a Cas9 nickase is shown below in SEQ ID NO: 674. The terms “nucleobase editors (NBEs)” and “base editors (BEs)” may be used interchangeably.

[0172] The term “uracil glycosylase inhibitor” or “UGI,” as used herein, refers to a protein that is capable of inhibiting a uracil-DNA glycosylase base-excision repair enzyme.

[0173] The term “Cas9 nickase,” as used herein, refers to a Cas9 protein that is capable of cleaving only one strand of a duplexed nucleic acid molecule (e.g., a duplexed DNA molecule). In some embodiments, a Cas9 nickase comprises a D10A mutation and has a histidine at position H840 of SEQ ID NO: 10, or a corresponding mutation in any of SEQ ID NOs: 11-260. For example, a Cas9 nickase may comprise the amino acid sequence as set forth in SEQ ID NO: 674. Such a Cas9 nickase has an active HNH nuclease domain and is able to cleave the non-targeted strand of DNA, i.e., the strand bound by the gRNA. Further, such a Cas9 nickase has an inactive RuvC nuclease domain and is not able to cleave the targeted strand of the DNA, i.e., the strand where base editing is desired.

[0174] Exemplary Cas9 nickase (Cloning vector pPlatTET-gRNA2; Accession No. BAV54124).

(SEQ ID NO: 674)
MDKKYSIGLAIGTNSVGWAVITDEYKVPSKKFKVLGNTDRHSIKK
NLIGALLFDSGETAEATRLKRTARRRYTRRKNRICYLQEIFSNEM
AKVDDSFFHRLEESFLVEEDKKHERHPIFGNIVDEVAYHEKYPTI
YHLRKKLVDSTDKADLRLIYLALAHMIKFRGHFLIEGDLNPDNSD
VDKLFIQLVQTYNQLFEENPINASGVDAKAILSARLSKSRRLENL
IAQLPGEKKNGLFGNLIALSLGLTPNFKSNFDLAEDAKLQLSKDT
YDDDLDNLLAQIGDQYADLFLAAKNLSDAILLSDILRVNTEITKA
PLSASMIKRYDEHHQDLTLLKALVRQQLPEKYKEIFFDQSKNGYA
GYIDGGASQEEFYKFIKPILEKMDGTEELLVKLNREDLLRKQRTF
DNGSIPHQIHLGELHAILRRQEDFYPFLKDNREKIEKILTFRIPY
YVGPLARGNSRFAWMTRKSEETITPWNFEEVVDKGASAQSFIERM
TNFDKNLPNEKVLPKHSLLYEYFTVYNELTKVKYVTEGMRKPAFL
SGEQKKAIVDLLFKTNRKVTVKQLKEDYFKKIECFDSVEISGVED
RFNASLGTYHDLLKIIKDKDFLDNEENEDILEDIVLTLTLFEDRE
MIEERLKTYAHLFDDKVMKQLKRRRYTGWGRLSRKLINGIRDKQS
GKTILDFLKSDGFANRNFMQLIHDDSLTFKEDIQKAQVSGQGDSL
HEHIANLAGSPAIKKGILQTVKVVDELVKVMGRHKPENIVIEMAR
ENQTTQKGQKNSRERMKRIEEGIKELGSQILKEHPVENTQLQNEK
LYLYYLQNGRDMYVDQELDINRLSDYDVDHIVPQSFLKDDSIDNK
VLTRSDKNRGKSDNVPSEEVVKKMKNYWRQLLNAKLITQRKFDNL
TKAERGGLSELDKAGFIKRQLVETRQITKHVAQILDSRMNTKYDE
NDKLIREVKVITLKSKLVSDFRKDFQFYKVREINNYHHAHDAYLN
AVVGTALIKKYPKLESEFVYGDYKVYDVRKMIAKSEQEIGKATAK
YFFYSNIMNFFKTEITLANGEIRKRPLIETNGETGEIVWDKGRDF
ATVRKVLSMPQVNIVKKTEVQTGGFSKESILPKRNSDKLIARKKD
WDPKKYGGFDSPTVAYSVLVVAKVEKGKSKKLKSVKELLGITIME
RSSFEKNPIDFLEAKGYKEVKKDLIIKLPKYSLFELENGRKRMLA
SAGELQKGNELALPSKYVNFLYLASHYEKLKGSPEDNEQKQLFVE
QHKHYLDEIIEQISEFSKRVILADANLDKVLSAYNKHRDKPIREQ
AENIIHLFTLTNLGAPAAFKYFDTTIDRKRYTSTKEVLDATLIHQ
SITGLYETRIDLSQLGGD

### DETAILED DESCRIPTION OF CERTAIN EMBODIMENTS OF THE INVENTION

[0175] Some aspects of this disclosure provide fusion proteins that comprise a domain capable of binding to a nucleotide sequence (e.g., a Cas9, or a Cpf1 protein) and an enzyme domain, for example, a DNA-editing domain, such as, e.g., a deaminase domain. The deamination of a nucleobase by a deaminase can lead to a point mutation at the respective residue, which is referred to herein as nucleic acid editing. Fusion proteins comprising a Cas9 variant or domain and a DNA editing domain can thus be used for the targeted editing of nucleic acid sequences. Such fusion proteins are useful for targeted editing of DNA in vitro, e.g., for the generation of mutant cells or animals; for the introduction of targeted mutations, e.g., for the correction of genetic defects in cells ex vivo, e.g., in cells obtained from a subject that are subsequently re-introduced into the same or another subject; and for the introduction of targeted mutations, e.g., the correction of genetic defects or the introduction of deactivating mutations in disease-associated genes in a subject. Typically, the Cas9 domain of the fusion proteins described herein does not have any nuclease activity but instead is a Cas9 fragment or a dCas9 protein or domain. Methods for the use of Cas9 fusion proteins as described herein are also provided.

### Cas9 Domains of Nucleobase Editors

[0176] Non-limiting, exemplary Cas9 domains are provided herein. The Cas9 domain may be a nuclease active Cas9 domain, a nuclease inactive Cas9 domain, or a Cas9 nickase. In some embodiments, the Cas9 domain is a nuclease active domain. For example, the Cas9 domain may be a Cas9 domain that cuts both strands of a duplexed nucleic acid (e.g., both strands of a duplexed DNA molecule). In some embodiments, the Cas9 domain comprises any one of the amino acid sequences as set forth in SEQ ID NOs: 10-263. In some embodiments the Cas9 domain comprises an amino acid sequence that is at least 60%, at least 65%, at least 70%, at least 75%, at least 80%, at least 85%, at least 90%, at least 95%, at least 96%, at least 97%, at least 98%, at least 99%, or at least 99.5% identical to any one of the amino acid sequences set forth in SEQ ID NOs: 10-263. In some embodiments, the Cas9 domain comprises an amino acid sequence that has 1, 2, 3, 4, 5, 6, 7, 8, 9, 10, 11, 12, 13, 14, 15, 16, 17, 18, 19, 20, 21, 22, 21, 24, 25, 26, 27, 28, 29, 30, 31, 32, 33, 34, 35, 36, 37, 38, 39, 40, 41, 42, 43, 44, 45, 46, 47, 48, 49, 50 or more or more mutations compared to any one of the amino acid sequences set forth in SEQ ID NOs: 10-263. In some embodiments, the Cas9 domain comprises an amino acid sequence that has at least 10, at least 15, at least 20, at least 30, at least 40, at least 50, at least 60, at least 70, at least 80, at least 90, at least 100, at least 150, at least 200, at least 250, at least 300, at least 350, at least 400, at least 500, at least 600, at least 700, at least 800, at least 900, at least 1000, at least 1100, or at least 1200 identical contiguous amino acid residues as compared to any one of the amino acid sequences set forth in SEQ ID NOs: 10-263.

[0177] In some embodiments, the Cas9 domain is a nuclease-inactive Cas9 domain (dCas9). For example, the dCas9 domain may bind to a duplexed nucleic acid molecule (e.g., via a gRNA molecule) without cleaving either strand of the duplexed nucleic acid molecule. In some embodiments, the nuclease-inactive dCas9 domain comprises a D10X mutation and a H840X mutation of the amino acid sequence set forth in SEQ ID NO: 10, or a corresponding mutation in any of the amino acid sequences provided in SEQ ID NOs: 11-260, wherein X is any amino acid change. In some embodiments, the nuclease-inactive dCas9 domain comprises a D10A mutation and a H840A mutation of the amino acid sequence set forth in SEQ ID NO: 10, or a corresponding mutation in any of the amino acid sequences provided in SEQ ID NOs: 11-260. As one example, a nuclease-inactive Cas9 domain comprises the amino acid sequence set forth in SEQ ID NO: 263 (Cloning vector pPlatTET-gRNA2, Accession No. BAV54124).

(SEQ ID NO: 263
MDKKYSIGLAIGTNSVGWAVITDEYKVPSKKFKVLGNTDRHSIKK
NLIGALLFDSGETAEATRLKRTARRRYTRRKNRICYLQEIFSNEM
AKVDDSFFHRLEESFLVEEDKKHERHPIFGNIVDEVAYHEKYPTI
YHLRKKLVDSTDKADLRLIYLALAHMIKFRGHFLIEGDLNPDNSD
VDKLFIQLVQTYNQLFEENPINASGVDAKAILSARLSKSRRLENL
IAQLPGEKKNGLFGNLIALSLGLTPNFKSNFDLAEDAKLQLSKDT
YDDDLDNLLAQIGDQYADLFLAAKNLSDAILLSDILRVNTEITKA
PLSASMIKRYDEHHQDLTLLKALVRQQLPEKYKEIFFDQSKNGYA
GYIDGGASQEEFYKFIKPILEKMDGTEELLVKLNREDLLRKQRTF
DNGSIPHQIHLGELHAILRRQEDFYPFLKDNREKIEKILTFRIPY
YVGPLARGNSRFAWMTRKSEETITPWNFEEVVDKGASAQSFIERM
TNFDKNLPNEKVLPKHSLLYEYFTVYNELTKVKYVTEGMRKPAFL
SGEQKKAIVDLLFKTNRKVTVKQLKEDYFKKIECFDSVEISGVED
RFNASLGTYHDLLKIIKDKDFLDNEENEDILEDIVLTLTLFEDRE
MIEERLKTYAHLFDDKVMKQLKRRRYTGWGRLSRKLINGIRDKQS
GKTILDFLKSDGFANRNFMQLIHDDSLTFKEDIQKAQVSGQGDSL
HEHIANLAGSPAIKKGILQTVKVVDELVKVMGRHKPENIVIEMAR
ENQTTQKGQKNSRERMKRIEEGIKELGSQILKEHPVENTQLQNEK
LYLYYLQNGRDMYVDQELDINRLSDYDVDAIVPQSFLKDDSIDNK
VLTRSDKNRGKSDNVPSEEVVKKMKNYWRQLLNAKLITQRKFDNL
TKAERGGLSELDKAGFIKRQLVETRQITKHVAQILDSRMNTKYDE
NDKLIREVKVITLKSKLVSDFRKDFQFYKVREINNYHHAHDAYLN
AVVGTALIKKYPKLESEFVYGDYKVYDVRKMIAKSEQEIGKATAK
YFFYSNIMNFFKTEITLANGEIRKRPLIETNGETGEIVWDKGRDF
ATVRKVLSMPQVNIVKKTEVQTGGFSKESILPKRNSDKLIARKKD
WDPKKYGGFDSPTVAYSVLVVAKVEKGKSKKLKSVKELLGITIME
RSSFEKNPIDFLEAKGYKEVKKDLIIKLPKYSLFELENGRKRMLA
SAGELQKGNELALPSKYVNFLYLASHYEKLKGSPEDNEQKQLFVE
QHKHYLDEIIEQISEFSKRVILADANLDKVLSAYNKHRDKPIREQ
AENIIHLFTLTNLGAPAAFKYFDTTIDRKRYTSTKEVLDATLIHQ
SITGLYETRIDLSQLGGD;

see, e.g., Qi et al., Repurposing CRISPR as an RNA-guided platform for sequence-specific control of gene expression. Cell. 2013; 152(5):1173-83, the entire contents of which are incorporated herein by reference).

[0178] Additional suitable nuclease-inactive dCas9 domains will be apparent to those of skill in the art based on this disclosure and knowledge in the field, and are within the scope of this disclosure. Such additional exemplary suitable nuclease-inactive Cas9 domains include, but are not limited to, D10A/H840A, D10A/D839A/H840A, and D10A/D839A/H840A/N863A mutant domains (See, e.g., Prashant et al., CAS9 transcriptional activators for target specificity screening and paired nickases for cooperative genome engineering. Nature Biotechnology. 2013; 31(9): 833-838, the entire contents of which are incorporated herein by reference). In some embodiments the dCas9 domain comprises an amino acid sequence that is at least 60%, at least 65%, at least 70%, at least 75%, at least 80%, at least 85%, at least 90%, at least 95%, at least 96%, at least 97%, at least 98%, at least 99%, or at least 99.5% identical to any one of the dCas9 domains provided herein. In some embodiments, the Cas9 domain comprises an amino acid sequences that has 1, 2, 3, 4, 5, 6, 7, 8, 9, 10, 11, 12, 13, 14, 15, 16, 17, 18, 19, 20, 21, 22, 21, 24, 25, 26, 27, 28, 29, 30, 31, 32, 33, 34, 35, 36, 37, 38, 39, 40, 41, 42, 43, 44, 45, 46, 47, 48, 49, 50 or more or more mutations compared to any one of the amino acid sequences set forth in SEQ ID NOs: 10-263. In some embodiments, the Cas9 domain comprises an amino acid sequence that has at least 10, at least 15, at least 20, at least 30, at least 40, at least 50, at least 60, at least 70, at least 80, at least 90, at least 100, at least 150, at least 200, at least 250, at least 300, at least 350, at least 400, at least 500, at least 600, at least 700, at least 800, at least 900, at least 1000, at least 1100, or at least 1200 identical contiguous amino acid residues as compared to any one of the amino acid sequences set forth in SEQ ID NOs: 10-263.

[0179] In some embodiments, the Cas9 domain is a Cas9 nickase. The Cas9 nickase may be a Cas9 protein that is capable of cleaving only one strand of a duplexed nucleic acid molecule (e.g., a duplexed DNA molecule). In some embodiments the Cas9 nickase cleaves the target strand of a duplexed nucleic acid molecule, meaning that the Cas9 nickase cleaves the strand that is base paired to (complementary to) a gRNA (e.g., an sgRNA) that is bound to the Cas9. In some embodiments, a Cas9 nickase comprises a D10A mutation and has a histidine at position 840 of SEQ ID NO: 10, or a mutation in any of SEQ ID NOs: 11-260. For example, a Cas9 nickase may comprise the amino acid sequence as set forth in SEQ ID NO: 674. In some embodiments the Cas9 nickase cleaves the non-target, non-base-edited strand of a duplexed nucleic acid molecule, meaning that the Cas9 nickase cleaves the strand that is not base paired to a gRNA (e.g., an sgRNA) that is bound to the Cas9. In some embodiments, a Cas9 nickase comprises an H840A mutation and has an aspartic acid residue at position 10 of SEQ ID NO: 10, or a corresponding mutation in any of SEQ ID NOs: 11-260. In some embodiments the Cas9 nickase comprises an amino acid sequence that is at least 60%, at least 65%, at least 70%, at least 75%, at least 80%, at least 85%, at least 90%, at least 95%, at least 96%, at least 97%, at least 98%, at least 99%, or at least 99.5% identical to any one of the Cas9 nickases provided herein. Additional suitable Cas9 nickases will be apparent to those of skill in the art based on this disclosure and knowledge in the field, and are within the scope of this disclosure.

Cas9 Domains with Reduced PAM Exclusivity

[0180] Some aspects of the disclosure provide Cas9 domains that have different PAM specificities. Typically, Cas9 proteins, such as Cas9 from S. pyogenes (spCas9), require a canonical NGG PAM sequence to bind a particular nucleic acid region. This may limit the ability to edit desired bases within a genome. In some embodiments, the base editing fusion proteins provided herein may need to be placed at a precise location, for example where a target base is placed within a 4 base region (e.g., a “deamination window”), which is approximately 15 bases upstream of the PAM. See Komor, A. C., et al., “Programmable editing of a target base in genomic DNA without double-stranded DNA cleavage” Nature 533, 420-424 (2016), the entire contents of which are hereby incorporated by reference. Accordingly, in some embodiments, any of the fusion proteins provided herein may contain a Cas9 domain that is capable of binding a nucleotide sequence that does not contain a canonical (e.g., NGG) PAM sequence. Cas9 domains that bind to non-canonical PAM sequences have been described in the art and would be apparent to the skilled artisan. For example, Cas9 domains that bind non-canonical PAM sequences have been described in Kleinstiver, B. P., et al., “Engineered CRISPR-Cas9 nucleases with altered PAM specificities” Nature 523, 481-485 (2015); and Kleinstiver, B. P., et al., “Broadening the targeting range of Staphylococcus aureus CRISPR-Cas9 by modifying PAM recognition” Nature Biotechnology 33, 1293-1298 (2015); the entire contents of each are hereby incorporated by reference.

[0181] In some embodiments, the Cas9 domain is a Cas9 domain from Staphylococcus aureus (SaCas9). In some embodiments, the SaCas9 domain is a nuclease active SaCas9, a nuclease inactive SaCas9 (SaCas9d), or a SaCas9 nickase (SaCas9n). In some embodiments, the SaCas9 comprises the amino acid sequence SEQ ID NO: 4273. In some embodiments, the SaCas9 comprises a N579X mutation of SEQ ID NO: 4273, or a corresponding mutation in any of the amino acid sequences provided in SEQ ID NOs: 11-260, wherein X is any amino acid except for N. In some embodiments, the SaCas9 comprises a N579A mutation of SEQ ID NO: 4273, or a corresponding mutation in any of the amino acid sequences provided in SEQ ID NOs: 11-260. In some embodiments, the SaCas9 domain, the SaCas9d domain, or the SaCas9n domain can bind to a nucleic acid sequence having a non-canonical PAM. In some embodiments, the SaCas9 domain, the SaCas9d domain, or the SaCas9n domain can bind to a nucleic acid sequence having a NNGRRT PAM sequence. In some embodiments, the SaCas9 domain comprises one or more of a E781X, a N967X, and a R1014X mutation of SEQ ID NO: 4273, or a corresponding mutation in any of the amino acid sequences provided in SEQ ID NOs: 11-260, wherein X is any amino acid. In some embodiments, the SaCas9 domain comprises one or more of a E781K, a N967K, and a R1014H mutation of SEQ ID NO: 4273, or one or more corresponding mutation in any of the amino acid sequences provided in SEQ ID NOs: 11-260. In some embodiments, the SaCas9 domain comprises a E781K, a N967K, or a R1014H mutation of SEQ ID NO: 4273, or corresponding mutations in any of the amino acid sequences provided in SEQ ID NOs: 11-260.

[0182] In some embodiments, the Cas9 domain of any of the fusion proteins provided herein comprises an amino acid sequence that is at least 60%, at least 65%, at least 70%, at least 75%, at least 80%, at least 85%, at least 90%, at least 95%, at least 96%, at least 97%, at least 98%, at least 99%, or at least 99.5% identical to any one of SEQ ID NOs: 4273-4275. In some embodiments, the Cas9 domain of any of the fusion proteins provided herein comprises the amino acid sequence of any one of SEQ ID NOs: 4273-4275. In some embodiments, the Cas9 domain of any of the fusion proteins provided herein consists of the amino acid sequence of any one of SEQ ID NOs: 4273-4275.

Exemplary SaCas9 sequence
(SEQ ID NO: 4273)
KRNYILGLDIGITSVGYGIIDYETRDVIDAGVRLFKEANVENNEG
RRSKRGARRLKRRRRHRIQRVKKLLFDYNLLTDHSELSGINPYEA
RVKGLSQKLSEEEFSAALLHLAKRRGVHNVNEVEEDTGNELSTKE
QISRNSKALEEKYVAELQLERLKKDGEVRGSINRFKTSDYVKEAK
QLLKVQKAYHQLDQSFIDTYIDLLETRRTYYEGPGEGSPFGWKDI
KEWYEMLMGHCTYFPEELRSVKYAYNADLYNALNDLNNLVITRDE
NEKLEYYEKFQIIENVFKQKKKPTLKQIAKEILVNEEDIKGYRVT
STGKPEFTNLKVYHDIKDITARKEIIENAELLDQIAKILTIYQSS
EDIQEELTNLNSELTQEEIEQISNLKGYTGTHNLSLKAINLILDE
LWHTNDNQIAIFNRLKLVPKKVDLSQQKEIPTTLVDDFILSPVVK
RSFIQSIKVINAIIKKYGLPNDIIIELAREKNSKDAQKMINEMQK
RNRQTNERIEEIIRTTGKENAKYLIEKIKLHDMQEGKCLYSLEAI
PLEDLLNNPFNYEVDHIIPRSVSFDNSFNNKVLVKQEENSKKGNR
TPFQYLSSSDSKISYETFKKHILNLAKGKGRISKTKKEYLLEERD
INRFSVQKDFINRNLVDTRYATRGLMNLLRSYFRVNNLDVKVKSI
NGGFTSFLRRKWKFKKERNKGYKHHAEDALIIANADFIFKEWKKL
DKAKKVMENQMFEEKQAESMPEIETEQEYKEIFITPHQIKHIKDF
KDYKYSHRVDKKPNRELINDTLYSTRKDDKGNTLIVNNLNGLYDK
DNDKLKKLINKSPEKLLMYHHDPQTYQKLKLIMEQYGDEKNPLYK
YYEETGNYLTKYSKKDNGPVIKKIKYYGNKLNAHLDITDDYPNSR
NKVVKLSLKPYRFDVYLDNGVYKFVTVKNLDVIKKENYYEVNSKC
YEEAKKLKKISNQAEFIASFYNNDLIKINGELYRVIGVNNDLLNR
IEVNMIDITYREYLENMNDKRPPRIIKTIASKTQSIKKYSTDILG
NLYEVKSKKHPQIIKKG

Residue N579 of SEQ ID NO: 4273, which is underlined and in bold, may be mutated (e.g., to a A579) to yield a SaCas9 nickase.

Exemplary SaCas9n sequence
(SEQ ID NO: 4274)
KRNYILGLDIGITSVGYGIIDYETRDVIDAGVRLFKEANVENNEG
RRSKRGARRLKRRRRHRIQRVKKLLFDYNLLTDHSELSGINPYEA
RVKGLSQKLSEEEFSAALLHLAKRRGVHNVNEVEEDTGNELSTKE
QISRNSKALEEKYVAELQLERLKKDGEVRGSINRFKTSDYVKEAK
QLLKVQKAYHQLDQSFIDTYIDLLETRRTYYEGPGEGSPFGWKDI
KEWYEMLMGHCTYFPEELRSVKYAYNADLYNALNDLNNLVITRDE
NEKLEYYEKFQIIENVFKQKKKPTLKQIAKEILVNEEDIKGYRVT
STGKPEFTNLKVYHDIKDITARKEIIENAELLDQIAKILTIYQSS
EDIQEELTNLNSELTQEEIEQISNLKGYTGTHNLSLKAINLILDE
LWHTNDNQIAIFNRLKLVPKKVDLSQQKEIPTTLVDDFILSPVVK
RSFIQSIKVINAIIKKYGLPNDIIIELAREKNSKDAQKMINEMQK
RNRQTNERIEEIIRTTGKENAKYLIEKIKLHDMQEGKCLYSLEAI
PLEDLLNNPFNYEVDHIIPRSVSFDNSFNNKVLVKQEEASKKGNR
TPFQYLSSSDSKISYETFKKHILNLAKGKGRISKTKKEYLLEERD
INRFSVQKDFINRNLVDTRYATRGLMNLLRSYFRVNNLDVKVKSI
NGGFTSFLRRKWKFKKERNKGYKHHAEDALIIANADFIFKEWKKL
DKAKKVMENQMFEEKQAESMPEIETEQEYKEIFITPHQIKHIKDF
KDYKYSHRVDKKPNRELINDTLYSTRKDDKGNTLIVNNLNGLYDK
DNDKLKKLINKSPEKLLMYHHDPQTYQKLKLIMEQYGDEKNPLYK
YYEETGNYLTKYSKKDNGPVIKKIKYYGNKLNAHLDITDDYPNSR
NKVVKLSLKPYRFDVYLDNGVYKFVTVKNLDVIKKENYYEVNSKC
YEEAKKLKKISNQAEFIASFYNNDLIKINGELYRVIGVNNDLLNR
IEVNMIDITYREYLENMNDKRPPRIIKTIASKTQSIKKYSTDILG
NLYEVKSKKHPQIIKKG.

Residue A579 of SEQ ID NO: xx, which can be mutated from N579 of SEQ ID NO: 4274 to yield a SaCas9 nickase, is underlined and in bold.

Exemplary SaKKH Cas9
(SEQ ID NO: 4275)
KRNYILGLDIGITSVGYGIIDYETRDVIDAGVRLFKEANVENNEG
RRSKRGARRLKRRRRHRIQRVKKLLFDYNLLTDHSELSGINPYEA
RVKGLSQKLSEEEFSAALLHLAKRRGVHNVNEVEEDTGNELSTKE
QISRNSKALEEKYVAELQLERLKKDGEVRGSINRFKTSDYVKEAK
QLLKVQKAYHOLDQSFIDTYIDLLETRRTYYEGPGEGSPFGWKDI
KEWYEMLMGHCTYFPEELRSVKYAYNADLYNALNDLNNLVITRDE
NEKLEYYEKFQIIENVFKQKKKPTLKQIAKEILVNEEDIKGYRVT
STGKPEFTNLKVYHDIKDITARKEIIENAELLDQIAKILTIYQSS
EDIQEELTNLNSELTQEEIEQISNLKGYTGTHNLSLKAINLILDE
LWHTNDNQIAIFNRLKLVPKKVDLSQQKEIPTTLVDDFILSPVVK
RSFIQSIKVINAIIKKYGLPNDIIIELAREKNSKDAQKMINEMQK
RNRQTNERIEEIIRTTGKENAKYLIEKIKLHDMQEGKCLYSLEAI
PLEDLLNNPFNYEVDHIIPRSVSFDNSFNNKVLVKQEEASKKGNR
TPFQYLSSSDSKISYETFKKHILNLAKGKGRISKTKKEYLLEERD
INRFSVQKDFINRNLVDTRYATRGLMNLLRSYFRVNNLDVKVKSI
NGGFTSFLRRKWKFKKERNKGYKHHAEDALIIANADFIFKEWKKL
DKAKKVMENOMFEEKQAESMPEIETEQEYKEIFITPHQIKHIKDF
KDYKYSHRVDKKPNRKLINDTLYSTRKDDKGNTLIVNNLNGLYDK
DNDKLKKLINKSPEKLLMYHHDPQTYQKLKLIMEQYGDEKNPLYK
YYEETGNYLTKYSKKDNGPVIKKIKYYGNKLNAHLDITDDYPNSR
NKVVKLSLKPYRFDVYLDNGVYKFVTVKNLDVIKKENYYEVNSKC
YEEAKKLKKISNQAEFIASFYKNDLIKINGELYRVIGVNNDLLNR
IEVNMIDITYREYLENMNDKRPPHIIKTIASKTQSIKKYSTDILG
NLYEVKSKKHPQIIKKG.

Residue A579 of SEQ ID NO: 4275, which can be mutated from N579 of SEQ ID NO: 4275 to yield a SaCas9 nickase, is underlined and in bold. Residues K781, K967, and H1014 of SEQ ID NO: 4275, which can be mutated from E781, N967, and R1014 of SEQ ID NO: 4275 to yield a SaKKH Cas9 are underlined and in italics.

[0183] In some embodiments, the Cas9 domain is a Cas9 domain from Streptococcus pyogenes (SpCas9). In some embodiments, the SpCas9 domain is a nuclease active SpCas9, a nuclease inactive SpCas9 (SpCas9d), or a SpCas9 nickase (SpCas9n). In some embodiments, the SpCas9 comprises the amino acid sequence SEQ ID NO: 4276. In some embodiments, the SpCas9 comprises a D9X mutation of SEQ ID NO: 4276, or a corresponding mutation in any of the amino acid sequences provided in SEQ ID NOs: 11-260, wherein X is any amino acid except for D. In some embodiments, the SpCas9 comprises a D9A mutation of SEQ ID NO: 4276, or a corresponding mutation in any of the amino acid sequences provided in SEQ ID NOs: 11-260. In some embodiments, the SpCas9 domain, the SpCas9d domain, or the SpCas9n domain can bind to a nucleic acid sequence having a non-canonical PAM. In some embodiments, the SpCas9 domain, the SpCas9d domain, or the SpCas9n domain can bind to a nucleic acid sequence having a NGG, a NGA, or a NGCG PAM sequence. In some embodiments, the SpCas9 domain comprises one or more of a D1134X, a R1334X, and a T1336X mutation of SEQ ID NO: 4276, or a corresponding mutation in any of the amino acid sequences provided in SEQ ID NOs: 11-260, wherein X is any amino acid. In some embodiments, the SpCas9 domain comprises one or more of a D1134E, R1334Q, and T1336R mutation of SEQ ID NO: 4276, or a corresponding mutation in any of the amino acid sequences provided in SEQ ID NOs: 11-260. In some embodiments, the SpCas9 domain comprises a D1134E, a R1334Q, and a T1336R mutation of SEQ ID NO: 4276, or corresponding mutations in any of the amino acid sequences provided in SEQ ID NOs: 11-260. In some embodiments, the SpCas9 domain comprises one or more of a D1134X, a R1334X, and a T1336X mutation of SEQ ID NO: 4276, or a corresponding mutation in any of the amino acid sequences provided in SEQ ID NOs: 11-260, wherein X is any amino acid. In some embodiments, the SpCas9 domain comprises one or more of a D1134V, a R1334Q, and a T1336R mutation of SEQ ID NO: 4276, or a corresponding mutation in any of the amino acid sequences provided in SEQ ID NOs: 11-260. In some embodiments, the SpCas9 domain comprises a D1134V, a R1334Q, and a T1336R mutation of SEQ ID NO: 4276, or corresponding mutations in any of the amino acid sequences provided in SEQ ID NOs: 11-260. In some embodiments, the SpCas9 domain comprises one or more of a D1134X, a G1217X, a R1334X, and a T1336X mutation of SEQ ID NO: 4276, or a corresponding mutation in any of the amino acid sequences provided in SEQ ID NOs: 11-260, wherein X is any amino acid. In some embodiments, the SpCas9 domain comprises one or more of a D1134V, a G1217R, a R1334Q, and a T1336R mutation of SEQ ID NO: 4276, or a corresponding mutation in any of the amino acid sequences provided in SEQ ID NOs: 11-260. In some embodiments, the SpCas9 domain comprises a D1134V, a G1217R, a R1334Q, and a T1336R mutation of SEQ ID NO: 4276, or corresponding mutations in any of the amino acid sequences provided in SEQ ID NOs: 11-260.

[0184] In some embodiments, the Cas9 domain of any of the fusion proteins provided herein comprises an amino acid sequence that is at least 60%, at least 65%, at least 70%, at least 75%, at least 80%, at least 85%, at least 90%, at least 95%, at least 96%, at least 97%, at least 98%, at least 99%, or at least 99.5% identical to any one of SEQ ID NOs: 4276-4280. In some embodiments, the Cas9 domain of any of the fusion proteins provided herein comprises the amino acid sequence of any one of SEQ ID NOs: 4276-4280. In some embodiments, the Cas9 domain of any of the fusion proteins provided herein consists of the amino acid sequence of any one of SEQ ID NOs: 4276-4280.

Exemplary SpCas9
(SEQ ID NO: 4276)
DKKYSIGLDIGTNSVGWAVITDEYKVPSKKFKVLGNTDRHSIKKN
LIGALLFDSGETAEATRLKRTARRRYTRRKNRICYLQEIFSNEMA
KVDDSFFHRLEESFLVEEDKKHERHPIFGNIVDEVAYHEKYPTIY
HLRKKLVDSTDKADLRLIYLALAHMIKFRGHFLIEGDLNPDNSDV
DKLFIQLVQTYNQLFEENPINASGVDAKAILSARLSKSRRLENLI
AQLPGEKKNGLFGNLIALSLGLTPNFKSNFDLAEDAKLQLSKDTY
DDDLDNLLAQIGDQYADLFLAAKNLSDAILLSDILRVNTEITKAP
LSASMIKRYDEHHQDLTLLKALVRQQLPEKYKEIFFDQSKNGYAG
YIDGGASQEEFYKFIKPILEKMDGTEELLVKLNREDLLRKQRTFD
NGSIPHQIHLGELHAILRRQEDFYPFLKDNREKIEKILTFRIPYY
VGPLARGNSRFAWMTRKSEETITPWNFEEVVDKGASAQSFIERMT
NFDKNLPNEKVLPKHSLLYEYFTVYNELTKVKYVTEGMRKPAFLS
GEQKKAIVDLLFKTNRKVTVKQLKEDYFKKIECFDSVEISGVEDR
FNASLGTYHDLLKIIKDKDFLDNEENEDILEDIVLTLTLFEDREM
IEERLKTYAHLFDDKVMKQLKRRRYTGWGRLSRKLINGIRDKQSG
KTILDFLKSDGFANRNFMQLIHDDSLTFKEDIQKAQVSGQGDSLH
EHIANLAGSPAIKKGILQTVKVVDELVKVMGRHKPENIVIEMARE
NQTTQKGQKNSRERMKRIEEGIKELGSQILKEHPVENTQLQNEKL
YLYYLQNGRDMYVDQELDINRLSDYDVDHIVPQSFLKDDSIDNKV
LTRSDKNRGKSDNVPSEEVVKKMKNYWRQLLNAKLITQRKFDNLT
KAERGGLSELDKAGFIKRQLVETRQITKHVAQILDSRMNTKYDEN
DKLIREVKVITLKSKLVSDFRKDFQFYKVREINNYHHAHDAYLNA
VVGTALIKKYPKLESEFVYGDYKVYDVRKMIAKSEQEIGKATAKY
FFYSNIMNFFKTEITLANGEIRKRPLIETNGETGEIVWDKGRDFA
TVRKVLSMPQVNIVKKTEVQTGGFSKESILPKRNSDKLIARKKDW
DPKKYGGFDSPTVAYSVLVVAKVEKGKSKKLKSVKELLGITIMER
SSFEKNPIDFLEAKGYKEVKKDLIIKLPKYSLFELENGRKRMLAS
AGELQKGNELALPSKYVNFLYLASHYEKLKGSPEDNEQKQLFVEQ
HKHYLDEIIEQISEFSKRVILADANLDKVLSAYNKHRDKPIREQA
ENIIHLFTLTNLGAPAAFKYFDTTIDRKRYTSTKEVLDATLIHQS
ITGLYETRIDLSQLGGD
Exemplary SpCas9n
(SEQ ID NO: 4277)
DKKYSIGLAIGTNSVGWAVITDEYKVPSKKFKVLGNTDRHSIKKN
LIGALLFDSGETAEATRLKRTARRRYTRRKNRICYLQEIFSNEMA
KVDDSFFHRLEESFLVEEDKKHERHPIFGNIVDEVAYHEKYPTIY
HLRKKLVDSTDKADLRLIYLALAHMIKFRGHFLIEGDLNPDNSDV
DKLFIQLVQTYNQLFEENPINASGVDAKAILSARLSKSRRLENLI
AQLPGEKKNGLFGNLIALSLGLTPNFKSNFDLAEDAKLQLSKDTY
DDDLDNLLAQIGDQYADLFLAAKNLSDAILLSDILRVNTEITKAP
LSASMIKRYDEHHQDLTLLKALVRQQLPEKYKEIFFDQSKNGYAG
YIDGGASQEEFYKFIKPILEKMDGTEELLVKLNREDLLRKQRTFD
NGSIPHQIHLGELHAILRRQEDFYPFLKDNREKIEKILTFRIPYY
VGPLARGNSRFAWMTRKSEETITPWNFEEVVDKGASAQSFIERMT
NFDKNLPNEKVLPKHSLLYEYFTVYNELTKVKYVTEGMRKPAFLS
GEQKKAIVDLLFKTNRKVTVKQLKEDYFKKIECFDSVEISGVEDR
FNASLGTYHDLLKIIKDKDFLDNEENEDILEDIVLTLTLFEDREM
IEERLKTYAHLFDDKVMKQLKRRRYTGWGRLSRKLINGIRDKQSG
KTILDFLKSDGFANRNFMQLIHDDSLTFKEDIQKAQVSGQGDSLH
EHIANLAGSPAIKKGILQTVKVVDELVKVMGRHKPENIVIEMARE
NQTTQKGQKNSRERMKRIEEGIKELGSQILKEHPVENTQLQNEKL
YLYYLQNGRDMYVDQELDINRLSDYDVDHIVPQSFLKDDSIDNKV
LTRSDKNRGKSDNVPSEEVVKKMKNYWRQLLNAKLITQRKFDNLT
KAERGGLSELDKAGFIKRQLVETRQITKHVAQILDSRMNTKYDEN
DKLIREVKVITLKSKLVSDFRKDFQFYKVREINNYHHAHDAYLNA
VVGTALIKKYPKLESEFVYGDYKVYDVRKMIAKSEQEIGKATAKY
FFYSNIMNFFKTEITLANGEIRKRPLIETNGETGEIVWDKGRDFA
TVRKVLSMPQVNIVKKTEVQTGGFSKESILPKRNSDKLIARKKDW
DPKKYGGFDSPTVAYSVLVVAKVEKGKSKKLKSVKELLGITIMER
SSFEKNPIDFLEAKGYKEVKKDLIIKLPKYSLFELENGRKRMLAS
AGELQKGNELALPSKYVNFLYLASHYEKLKGSPEDNEQKQLFVEQ
HKHYLDEIIEQISEFSKRVILADANLDKVLSAYNKHRDKPIREQA
ENIIHLFTLTNLGAPAAFKYFDTTIDRKRYTSTKEVLDATLIHQS
ITGLYETRIDLSQLGGD
Exemplary SpEQR Cas9
(SEQ ID NO: 4278)
DKKYSIGLAIGTNSVGWAVITDEYKVPSKKFKVLGNTDRHSIKKN
LIGALLFDSGETAEATRLKRTARRRYTRRKNRICYLQEIFSNEMA
KVDDSFFHRLEESFLVEEDKKHERHPIFGNIVDEVAYHEKYPTI
YHLRKKLVDSTDKADLRLIYLALAHMIKFRGHFLIEGDLNPDNSD
VDKLFIQLVQTYNQLFEENPINASGVDAKAILSARLSKSRRLENL
IAQLPGEKKNGLFGNLIALSLGLTPNFKSNFDLAEDAKLQLSKDT
YDDDLDNLLAQIGDQYADLFLAAKNLSDAILLSDILRVNTEITKA
PLSASMIKRYDEHHQDLTLLKALVRQQLPEKYKEIFFDQSKNGYA
GYIDGGASQEEFYKFIKPILEKMDGTEELLVKLNREDLLRKQRTF
DNGSIPHQIHLGELHAILRRQEDFYPFLKDNREKIEKILTFRIPY
YVGPLARGNSRFAWMTRKSEETITPWNFEEVVDKGASAQSFIERM
TNFDKNLPNEKVLPKHSLLYEYFTVYNELTKVKYVTEGMRKPAFL
SGEQKKAIVDLLFKTNRKVTVKQLKEDYFKKIECFDSVEISGVED
RFNASLGTYHDLLKIIKDKDFLDNEENEDILEDIVLTLTLFEDRE
MIEERLKTYAHLFDDKVMKQLKRRRYTGWGRLSRKLINGIRDKQS
GKTILDFLKSDGFANRNFMQLIHDDSLTFKEDIQKAQVSGQGDSL
HEHIANLAGSPAIKKGILQTVKVVDELVKVMGRHKPENIVIEMAR
ENQTTQKGQKNSRERMKRIEEGIKELGSQILKEHPVENTQLQNEK
LYLYYLQNGRDMYVDQELDINRLSDYDVDHIVPQSFLKDDSIDNK
VLTRSDKNRGKSDNVPSEEVVKKMKNYWRQLLNAKLITQRKFDNL
TKAERGGLSELDKAGFIKRQLVETRQITKHVAQILDSRMNTKYDE
NDKLIREVKVITLKSKLVSDFRKDFQFYKVREINNYHHAHDAYLN
AVVGTALIKKYPKLESEFVYGDYKVYDVRKMIAKSEQEIGKATAK
YFFYSNIMNFFKTEITLANGEIRKRPLIETNGETGEIVWDKGRDF
ATVRKVLSMPQVNIVKKTEVQTGGFSKESILPKRNSDKLIARKKD
WDPKKYGGFESPTVAYSVLVVAKVEKGKSKKLKSVKELLGITIME
RSSFEKNPIDFLEAKGYKEVKKDLIIKLPKYSLFELENGRKRMLA
SAGELQKGNELALPSKYVNFLYLASHYEKLKGSPEDNEQKQLFVE
QHKHYLDEIIEQISEFSKRVILADANLDKVLSAYNKHRDKPIREQ
AENIIHLFTLTNLGAPAAFKYFDTTIDRKQYRSTKEVLDATLIHQ
SITGLYETRIDLSQLGGD

Residues E1134, Q1334, and R1336 of SEQ ID NO: 4278, which can be mutated from D1134, R1334, and T1336 of SEQ ID NO: 4278 to yield a SpEQR Cas9, are underlined and in bold.

Exemplary SpVQR Cas9
(SEQ ID NO: 4279)
DKKYSIGLAIGTNSVGWAVITDEYKVPSKKFKVLGNTDRHSIKKN
LIGALLFDSGETAEATRLKRTARRRYTRRKNRICYLQEIFSNEMA
KVDDSFFHRLEESFLVEEDKKHERHPIFGNIVDEVAYHEKYPTIY
HLRKKLVDSTDKADLRLIYLALAHMIKFRGHFLIEGDLNPDNSDV
DKLFIQLVQTYNQLFEENPINASGVDAKAILSARLSKSRRLENLI
AQLPGEKKNGLFGNLIALSLGLTPNFKSNFDLAEDAKLQLSKDTY
DDDLDNLLAQIGDQYADLFLAAKNLSDAILLSDILRVNTEITKAP
LSASMIKRYDEHHQDLTLLKALVRQQLPEKYKEIFFDQSKNGYAG
YIDGGASQEEFYKFIKPILEKMDGTEELLVKLNREDLLRKQRTFD
NGSIPHQIHLGELHAILRRQEDFYPFLKDNREKIEKILTFRIPYY
VGPLARGNSRFAWMTRKSEETITPWNFEEVVDKGASAQSFIERMT
NFDKNLPNEKVLPKHSLLYEYFTVYNELTKVKYVTEGMRKPAFLS
GEQKKAIVDLLFKTNRKVTVKQLKEDYFKKIECFDSVEISGVEDR
FNASLGTYHDLLKIIKDKDFLDNEENEDILEDIVLTLTLFEDREM
IEERLKTYAHLFDDKVMKQLKRRRYTGWGRLSRKLINGIRDKQSG
KTILDFLKSDGFANRNFMQLIHDDSLTFKEDIQKAQVSGQGDSLH
EHIANLAGSPAIKKGILQTVKVVDELVKVMGRHKPENIVIEMARE
NQTTQKGQKNSRERMKRIEEGIKELGSQILKEHPVENTQLQNEKL
YLYYLQNGRDMYVDQELDINRLSDYDVDHIVPQSFLKDDSIDNKV
LTRSDKNRGKSDNVPSEEVVKKMKNYWRQLLNAKLITQRKFDNLT
KAERGGLSELDKAGFIKRQLVETRQITKHVAQILDSRMNTKYDEN
DKLIREVKVITLKSKLVSDFRKDFQFYKVREINNYHHAHDAYLNA
VVGTALIKKYPKLESEFVYGDYKVYDVRKMIAKSEQEIGKATAKY
FFYSNIMNFFKTEITLANGEIRKRPLIETNGETGEIVWDKGRDFA
TVRKVLSMPQVNIVKKTEVQTGGFSKESILPKRNSDKLIARKKDW
DPKKYGGFVSPTVAYSVLVVAKVEKGKSKKLKSVKELLGITIMER
SSFEKNPIDFLEAKGYKEVKKDLIIKLPKYSLFELENGRKRMLAS
AGELQKGNELALPSKYVNFLYLASHYEKLKGSPEDNEQKQLFVEQ
HKHYLDEIIEQISEFSKRVILADANLDKVLSAYNKHRDKPIREQA
ENIIHLFTLTNLGAPAAFKYFDTTIDRKQYRSTKEVLDATLIHQS
ITGLYETRIDLSQLGGD

Residues V1134, Q1334, and R1336 of SEQ ID NO: 4279, which can be mutated from D1134, R1334, and T1336 of SEQ ID NO: 4279 to yield a SpVQR Cas9, are underlined and in bold.

Exemplary SpVRER Cas9
(SEQ ID NO: 4280)
DKKYSIGLAIGTNSVGWAVITDEYKVPSKKFKVLGNTDRHSIKKN
LIGALLFDSGETAEATRLKRTARRRYTRRKNRICYLQEIFSNEMA
KVDDSFFHRLEESFLVEEDKKHERHPIFGNIVDEVAYHEKYPTIY
HLRKKLVDSTDKADLRLIYLALAHMIKFRGHFLIEGDLNPDNSDV
DKLFIQLVQTYNQLFEENPINASGVDAKAILSARLSKSRRLENLI
AQLPGEKKNGLFGNLIALSLGLTPNFKSNFDLAEDAKLQLSKDTY
DDDLDNLLAQIGDQYADLFLAAKNLSDAILLSDILRVNTEITKAP
LSASMIKRYDEHHQDLTLLKALVRQQLPEKYKEIFFDQSKNGYAG
YIDGGASQEEFYKFIKPILEKMDGTEELLVKLNREDLLRKQRTFD
NGSIPHQIHLGELHAILRRQEDFYPFLKDNREKIEKILTFRIPYY
VGPLARGNSRFAWMTRKSEETITPWNFEEVVDKGASAQSFIERMT
NFDKNLPNEKVLPKHSLLYEYFTVYNELTKVKYVTEGMRKPAFLS
GEQKKAIVDLLFKTNRKVTVKQLKEDYFKKIECFDSVEISGVEDR
FNASLGTYHDLLKIIKDKDFLDNEENEDILEDIVLTLTLFEDREM
IEERLKTYAHLFDDKVMKQLKRRRYTGWGRLSRKLINGIRDKQSG
KTILDFLKSDGFANRNFMQLIHDDSLTFKEDIQKAQVSGQGDSLH
EHIANLAGSPAIKKGILQTVKVVDELVKVMGRHKPENIVIEMARE
NQTTQKGQKNSRERMKRIEEGIKELGSQILKEHPVENTQLQNEKL
YLYYLQNGRDMYVDQELDINRLSDYDVDHIVPQSFLKDDSIDNKV
LTRSDKNRGKSDNVPSEEVVKKMKNYWRQLLNAKLITQRKFDNLT
KAERGGLSELDKAGFIKRQLVETRQITKHVAQILDSRMNTKYDEN
DKLIREVKVITLKSKLVSDFRKDFQFYKVREINNYHHAHDAYLNA
VVGTALIKKYPKLESEFVYGDYKVYDVRKMIAKSEQEIGKATAKY
FFYSNIMNFFKTEITLANGEIRKRPLIETNGETGEIVWDKGRDFA
TVRKVLSMPQVNIVKKTEVQTGGFSKESILPKRNSDKLIARKKDW
DPKKYGGFVSPTVAYSVLVVAKVEKGKSKKLKSVKELLGITIMER
SSFEKNPIDFLEAKGYKEVKKDLIIKLPKYSLFELENGRKRMLAS
ARELQKGNELALPSKYVNFLYLASHYEKLKGSPEDNEQKQLFVEQ
HKHYLDEIIEQISEFSKRVILADANLDKVLSAYNKHRDKPIREQA
ENIIHLFTLTNLGAPAAFKYFDTTIDRKEYRSTKEVLDATLIHQS
ITGLYETRIDLSQLGGD

Residues V1134, R1217, Q1334, and R1336 of SEQ ID NO: 4280, which can be mutated from D1134, G1217, R1334, and T1336 of SEQ ID NO: 4280 to yield a SpVRER Cas9, are underlined and in bold.

[0185] The following are exemplary fusion proteins (e.g., base editing proteins) capable of binding to a nucleic acid sequence having a non-canonical (e.g., a non-NGG) PAM sequence:

Exemplary SaBE3 (rAPOBEC1-XTEN-SaCas9n-UGI-NLS)
(SEQ ID NO: 4281)
MSSETGPVAVDPTLRRRIEPHEFEVFFDPRELRKETCLLYEINWG
GRHSIWRHTSQNTNKHVEVNFIEKFTTERYFCPNTRCSITWFLSW
SPCGECSRAITEFLSRYPHVTLFIYIARLYHHADPRNRQGLRDLI
SSGVTIQIMTEQESGYCWRNFVNYSPSNEAHWPRYPHLWVRLYVL
ELYCIILGLPPCLNILRRKQPQLTFFTIALQSCHYQRLPPHILWA
TGLKSGSETPGTSESATPESKRNYILGLDIGITSVGYGIIDYETR
DVIDAGVRLFKEANVENNEGRRSKRGARRLKRRRRHRIQRVKKLL
FDYNLLTDHSELSGINPYEARVKGLSQKLSEEEFSAALLHLAKRR
GVHNVNEVEEDTGNELSTKEQISRNSKALEEKYVAELQLERLKKD
GEVRGSINRFKTSDYVKEAKQLLKVQKAYHQLDQSFIDTYIDLLE
TRRTYYEGPGEGSPFGWKDIKEWYEMLMGHCTYFPEELRSVKYAY
NADLYNALNDLNNLVITRDENEKLEYYEKFQIIENVFKQKKKPTL
KQIAKEILVNEEDIKGYRVTSTGKPEFTNLKVYHDIKDITARKEI
IENAELLDQIAKILTIYQSSEDIQEELTNLNSELTQEEIEQISNL
KGYTGTHNLSLKAINLILDELWHTNDNQIAIFNRLKLVPKKVDLS
QQKEIPTTLVDDFILSPVVKRSFIQSIKVINAIIKKYGLPNDIII
ELAREKNSKDAQKMINEMQKRNRQTNERIEEIIRTTGKENAKYLI
EKIKLHDMQEGKCLYSLEAIPLEDLLNNPFNYEVDHIIPRSVSFD
NSFNNKVLVKQEEASKKGNRTPFQYLSSSDSKISYETFKKHILNL
AKGKGRISKTKKEYLLEERDINRFSVQKDFINRNLVDTRYATRGL
MNLLRSYFRVNNLDVKVKSINGGFTSFLRRKWKFKKERNKGYKHH
AEDALIIANADFIFKEWKKLDKAKKVMENQMFEEKQAESMPEIET
EQEYKEIFITPHQIKHIKDFKDYKYSHRVDKKPNRELINDTLYST
RKDDKGNTLIVNNLNGLYDKDNDKLKKLINKSPEKLLMYHHDPQT
YQKLKLIMEQYGDEKNPLYKYYEETGNYLTKYSKKDNGPVIKKIK
YYGNKLNAHLDITDDYPNSRNKVVKLSLKPYRFDVYLDNGVYKFV
TVKNLDVIKKENYYEVNSKCYEEAKKLKKISNQAEFIASFYNNDL
IKINGELYRVIGVNNDLLNRIEVNMIDITYREYLENMNDKRPPRI
IKTIASKTQSIKKYSTDILGNLYEVKSKKHPQIIKKGSGGSTNLS
DIIEKETGKQLVIQESILMLPEEVEEVIGNKPESDILVHTAYDES
TDENVMLLTSDAPEYKPWALVIQDSNGENKIKMLSGGSPKKKRKV
Exemplary SaKKH-BE3
(rAPOBEC1-XTEN-SaCas9n-UGI-NLS)
(SEQ ID NO: 4282)
MSSETGPVAVDPTLRRRIEPHEFEVFFDPRELRKETCLLYEINWG
GRHSIWRHTSQNTNKHVEVNFIEKFTTERYFCPNTRCSITWFLSW
SPCGECSRAITEFLSRYPHVTLFIYIARLYHHADPRNRQGLRDLI
SSGVTIQIMTEQESGYCWRNFVNYSPSNEAHWPRYPHLWVRLYVL
ELYCIILGLPPCLNILRRKQPQLTFFTIALQSCHYQRLPPHILWA
TGLKSGSETPGTSESATPESKRNYILGLDIGITSVGYGIIDYETR
DVIDAGVRLFKEANVENNEGRRSKRGARRLKRRRRHRIQRVKKLL
FDYNLLTDHSELSGINPYEARVKGLSQKLSEEEFSAALLHLAKRR
GVHNVNEVEEDTGNELSTKEQISRNSKALEEKYVAELQLERLKKD
GEVRGSINRFKTSDYVKEAKQLLKVQKAYHQLDQSFIDTYIDLLE
TRRTYYEGPGEGSPFGWKDIKEWYEMLMGHCTYFPEELRSVKYAY
NADLYNALNDLNNLVITRDENEKLEYYEKFQIIENVFKQKKKPTL
KQIAKEILVNEEDIKGYRVTSTGKPEFTNLKVYHDIKDITARKEI
IENAELLDQIAKILTIYQSSEDIQEELTNLNSELTQEEIEQISNL
KGYTGTHNLSLKAINLILDELWHTNDNQIAIFNRLKLVPKKVDLS
QQKEIPTTLVDDFILSPVVKRSFIQSIKVINAIIKKYGLPNDIII
ELAREKNSKDAQKMINEMQKRNRQTNERIEEIIRTTGKENAKYLI
EKIKLHDMQEGKCLYSLEAIPLEDLLNNPFNYEVDHIIPRSVSFD
NSFNNKVLVKQEEASKKGNRTPFQYLSSSDSKISYETFKKHILNL
AKGKGRISKTKKEYLLEERDINRFSVQKDFINRNLVDTRYATRGL
MNLLRSYFRVNNLDVKVKSINGGFTSFLRRKWKFKKERNKGYKHH
AEDALIIANADFIFKEWKKLDKAKKVMENQMFEEKQAESMPEIET
EQEYKEIFITPHQIKHIKDFKDYKYSHRVDKKPNRKLINDTLYST
RKDDKGNTLIVNNLNGLYDKDNDKLKKLINKSPEKLLMYHHDPQT
YQKLKLIMEQYGDEKNPLYKYYEETGNYLTKYSKKDNGPVIKKIK
YYGNKLNAHLDITDDYPNSRNKVVKLSLKPYRFDVYLDNGVYKFV
TVKNLDVIKKENYYEVNSKCYEEAKKLKKISNQAEFIASFYKNDL
IKINGELYRVIGVNNDLLNRIEVNMIDITYREYLENMNDKRPPHI
IKTIASKTQSIKKYSTDILGNLYEVKSKKHPQIIKKGSGGSTNLS
DIIEKETGKQLVIQESILMLPEEVEEVIGNKPESDILVHTAYDES
TDENVMLLTSDAPEYKPWALVIQDSNGENKIKMLSGGSPKKKRKV
Exemplary EQR-BE3 (rAPOBEC1-XTEN-Cas9n-UGI-NLS)
(SEQ ID NO: 4283)
MSSETGPVAVDPTLRRRIEPHEFEVFFDPRELRKETCLLYEINWG
GRHSIWRHTSQNTNKHVEVNFIEKFTTERYFCPNTRCSITWFLSW
SPCGECSRAITEFLSRYPHVTLFIYIARLYHHADPRNRQGLRDLI
SSGVTIQIMTEQESGYCWRNFVNYSPSNEAHWPRYPHLWVRLYVL
ELYCIILGLPPCLNILRRKQPQLTFFTIALQSCHYQRLPPHILWA
TGLKSGSETPGTSESATPESDKKYSIGLAIGTNSVGWAVITDEYK
VPSKKFKVLGNTDRHSIKKNLIGALLFDSGETAEATRLKRTARRR
YTRRKNRICYLQEIFSNEMAKVDDSFFHRLEESFLVEEDKKHERH
PIFGNIVDEVAYHEKYPTIYHLRKKLVDSTDKADLRLIYLALAHM
IKFRGHFLIEGDLNPDNSDVDKLFIQLVQTYNQLFEENPINASGV
DAKAILSARLSKSRRLENLIAQLPGEKKNGLFGNLIALSLGLTPN
FKSNFDLAEDAKLQLSKDTYDDDLDNLLAQIGDQYADLFLAAKNL
SDAILLSDILRVNTEITKAPLSASMIKRYDEHHQDLTLLKALVRQ
QLPEKYKEIFFDQSKNGYAGYIDGGASQEEFYKFIKPILEKMDGT
EELLVKLNREDLLRKQRTFDNGSIPHQIHLGELHAILRRQEDFYP
FLKDNREKIEKILTFRIPYYVGPLARGNSRFAWMTRKSEETITPW
NFEEVVDKGASAQSFIERMTNFDKNLPNEKVLPKHSLLYEYFTVY
NELTKVKYVTEGMRKPAFLSGEQKKAIVDLLFKTNRKVTVKQLKE
DYFKKIECFDSVEISGVEDRFNASLGTYHDLLKIIKDKDFLDNEE
NEDILEDIVLTLTLFEDREMIEERLKTYAHLFDDKVMKQLKRRRY
TGWGRLSRKLINGIRDKQSGKTILDFLKSDGFANRNFMQLIHDDS
LTFKEDIQKAQVSGQGDSLHEHIANLAGSPAIKKGILQTVKVVDE
LVKVMGRHKPENIVIEMARENQTTQKGQKNSRERMKRIEEGIKEL
GSQILKEHPVENTQLQNEKLYLYYLQNGRDMYVDQELDINRLSDY
DVDHIVPQSFLKDDSIDNKVLTRSDKNRGKSDNVPSEEVVKKMKN
YWRQLLNAKLITQRKFDNLTKAERGGLSELDKAGFIKRQLVETRQ
ITKHVAQILDSRMNTKYDENDKLIREVKVITLKSKLVSDFRKDFQ
FYKVREINNYHHAHDAYLNAVVGTALIKKYPKLESEFVYGDYKVY
DVRKMIAKSEQEIGKATAKYFFYSNIMNFFKTEITLANGEIRKRP
LIETNGETGEIVWDKGRDFATVRKVLSMPQVNIVKKTEVQTGGFS
KESILPKRNSDKLIARKKDWDPKKYGGFESPTVAYSVLVVAKVEK
GKSKKLKSVKELLGITIMERSSFEKNPIDFLEAKGYKEVKKDLII
KLPKYSLFELENGRKRMLASAGELQKGNELALPSKYVNFLYLASH
YEKLKGSPEDNEQKQLFVEQHKHYLDEIIEQISEFSKRVILADAN
LDKVLSAYNKHRDKPIREQAENIIHLETLTNLGAPAAFKYFDTTI
DRKQYRSTKEVLDATLIHQSITGLYETRIDLSQLGGDSGGSTNLS
DIIEKETGKQLVIQESILMLPEEVEEVIGNKPESDILVHTAYDES
TDENVMLLTSDAPEYKPWALVIQDSNGENKIKMLSGGSPKKKRKV
VQR-BE3 (rAPOBEC1-XTEN-Cas9n-UGI-NLS)
(SEQ ID NO: 4284)
MSSETGPVAVDPTLRRRIEPHEFEVFFDPRELRKETCLLYEINWG
GRHSIWRHTSQNTNKHVEVNFIEKFTTERYFCPNTRCSITWFLSW
SPCGECSRAITEFLSRYPHVTLFIYIARLYHHADPRNRQGLRDLI
SSGVTIQIMTEQESGYCWRNFVNYSPSNEAHWPRYPHLWVRLYVL
ELYCIILGLPPCLNILRRKQPQLTFFTIALQSCHYQRLPPHILWA
TGLKSGSETPGTSESATPESDKKYSIGLAIGTNSVGWAVITDEYK
VPSKKFKVLGNTDRHSIKKNLIGALLFDSGETAEATRLKRTARRR
YTRRKNRICYLQEIFSNEMAKVDDSFFHRLEESFLVEEDKKHERH
PIFGNIVDEVAYHEKYPTIYHLRKKLVDSTDKADLRLIYLALAHM
IKFRGHFLIEGDLNPDNSDVDKLFIQLVQTYNQLFEENPINASGV
DAKAILSARLSKSRRLENLIAQLPGEKKNGLFGNLIALSLGLTPN
FKSNFDLAEDAKLQLSKDTYDDDLDNLLAQIGDQYADLFLAAKNL
SDAILLSDILRVNTEITKAPLSASMIKRYDEHHQDLTLLKALVRQ
QLPEKYKEIFFDQSKNGYAGYIDGGASQEEFYKFIKPILEKMDGT
EELLVKLNREDLLRKQRTFDNGSIPHQIHLGELHAILRRQEDFYP
FLKDNREKIEKILTFRIPYYVGPLARGNSRFAWMTRKSEETITPW
NFEEVVDKGASAQSFIERMTNFDKNLPNEKVLPKHSLLYEYFTVY
NELTKVKYVTEGMRKPAFLSGEQKKAIVDLLFKTNRKVTVKQLKE
DYFKKIECFDSVEISGVEDRFNASLGTYHDLLKIIKDKDFLDNEE
NEDILEDIVLTLTLFEDREMIEERLKTYAHLFDDKVMKQLKRRRY
TGWGRLSRKLINGIRDKQSGKTILDFLKSDGFANRNFMQLIHDDS
LTFKEDIQKAQVSGQGDSLHEHIANLAGSPAIKKGILQTVKVVDE
LVKVMGRHKPENIVIEMARENQTTQKGQKNSRERMKRIEEGIKEL
GSQILKEHPVENTQLQNEKLYLYYLQNGRDMYVDQELDINRLSDY
DVDHIVPQSFLKDDSIDNKVLTRSDKNRGKSDNVPSEEVVKKMKN
YWRQLLNAKLITQRKFDNLTKAERGGLSELDKAGFIKRQLVETRQ
ITKHVAQILDSRMNTKYDENDKLIREVKVITLKSKLVSDFRKDFQ
FYKVREINNYHHAHDAYLNAVVGTALIKKYPKLESEFVYGDYKVY
DVRKMIAKSEQEIGKATAKYFFYSNIMNFFKTEITLANGEIRKRP
LIETNGETGEIVWDKGRDFATVRKVLSMPQVNIVKKTEVQTGGFS
KESILPKRNSDKLIARKKDWDPKKYGGFVSPTVAYSVLVVAKVEK
GKSKKLKSVKELLGITIMERSSFEKNPIDFLEAKGYKEVKKDLII
KLPKYSLFELENGRKRMLASAGELQKGNELALPSKYVNFLYLASH
YEKLKGSPEDNEQKQLFVEQHKHYLDEIIEQISEFSKRVILADAN
LDKVLSAYNKHRDKPIREQAENIIHLFTLTNLGAPAAFKYFDTTI
DRKQYRSTKEVLDATLIHQSITGLYETRIDLSQLGGDSGGSTNLS
DIIEKETGKQLVIQESILMLPEEVEEVIGNKPESDILVHTAYDES
TDENVMLLTSDAPEYKPWALVIQDSNGENKIKMLSGGSPKKKRKV
VRER-BE3 (rAPOBEC1-XTEN-Cas9n-UGI-NLS)
(SEQ ID NO: 4285)
MSSETGPVAVDPTLRRRIEPHEFEVFFDPRELRKETCLLYEINWG
GRHSIWRHTSQNTNKHVEVNFIEKFTTERYFCPNTRCSITWFLSW
SPCGECSRAITEFLSRYPHVTLFIYIARLYHHADPRNRQGLRDLI
SSGVTIQIMTEQESGYCWRNFVNYSPSNEAHWPRYPHLWVRLYVL
ELYCIILGLPPCLNILRRKQPQLTFFTIALQSCHYQRLPPHILWA
TGLKSGSETPGTSESATPESDKKYSIGLAIGTNSVGWAVITDEYK
VPSKKFKVLGNTDRHSIKKNLIGALLFDSGETAEATRLKRTARRR
YTRRKNRICYLQEIFSNEMAKVDDSFFHRLEESFLVEEDKKHERH
PIFGNIVDEVAYHEKYPTIYHLRKKLVDSTDKADLRLIYLALAHM
IKFRGHFLIEGDLNPDNSDVDKLFIQLVQTYNQLFEENPINASGV
DAKAILSARLSKSRRLENLIAQLPGEKKNGLFGNLIALSLGLTPN
FKSNFDLAEDAKLQLSKDTYDDDLDNLLAQIGDQYADLFLAAKNL
SDAILLSDILRVNTEITKAPLSASMIKRYDEHHQDLTLLKALVRQ
QLPEKYKEIFFDQSKNGYAGYIDGGASQEEFYKFIKPILEKMDGT
EELLVKLNREDLLRKQRTFDNGSIPHQIHLGELHAILRRQEDFYP
FLKDNREKIEKILTFRIPYYVGPLARGNSRFAWMTRKSEETITPW
NFEEVVDKGASAQSFIERMTNFDKNLPNEKVLPKHSLLYEYFTVY
NELTKVKYVTEGMRKPAFLSGEQKKAIVDLLFKTNRKVTVKQLKE
DYFKKIECFDSVEISGVEDRFNASLGTYHDLLKIIKDKDFLDNEE
NEDILEDIVLTLTLFEDREMIEERLKTYAHLFDDKVMKQLKRRRY
TGWGRLSRKLINGIRDKQSGKTILDFLKSDGFANRNFMQLIHDDS
LTFKEDIQKAQVSGQGDSLHEHIANLAGSPAIKKGILQTVKVVDE
LVKVMGRHKPENIVIEMARENQTTQKGQKNSRERMKRIEEGIKEL
GSQILKEHPVENTQLQNEKLYLYYLQNGRDMYVDQELDINRLSDY
DVDHIVPQSFLKDDSIDNKVLTRSDKNRGKSDNVPSEEVVKKMKN
YWRQLLNAKLITQRKFDNLTKAERGGLSELDKAGFIKRQLVETRQ
ITKHVAQILDSRMNTKYDENDKLIREVKVITLKSKLVSDFRKDFQ
FYKVREINNYHHAHDAYLNAVVGTALIKKYPKLESEFVYGDYKVY
DVRKMIAKSEQEIGKATAKYFFYSNIMNFFKTEITLANGEIRKRP
LIETNGETGEIVWDKGRDFATVRKVLSMPQVNIVKKTEVQTGGFS
KESILPKRNSDKLIARKKDWDPKKYGGFVSPTVAYSVLVVAKVEK
GKSKKLKSVKELLGITIMERSSFEKNPIDFLEAKGYKEVKKDLII
KLPKYSLFELENGRKRMLASARELQKGNELALPSKYVNFLYLASH
YEKLKGSPEDNEQKQLFVEQHKHYLDEIIEQISEFSKRVILADAN
LDKVLSAYNKHRDKPIREQAENIIHLFTLTNLGAPAAFKYFDTTI
DRKEYRSTKEVLDATLIHQSITGLYETRIDLSQLGGDSGGSTNLS
DIIEKETGKQLVIQESILMLPEEVEEVIGNKPESDILVHTAYDES
TDENVMLLTSDAPEYKPWALVIQDSNGENKIKMLSGGSPKKKRKV

### High Fidelity Base Editors

[0186] Some aspects of the disclosure provide Cas9 fusion proteins (e.g., any of the fusion proteins provided herein) comprising a Cas9 domain that has high fidelity. Additional aspects of the disclosure provide Cas9 fusion proteins (e.g., any of the fusion proteins provided herein) comprising a Cas9 domain with decreased electrostatic interactions between the Cas9 domain and a sugar-phosphate backbone of a DNA, as compared to a wild-type Cas9 domain. In some embodiments, a Cas9 domain (e.g., a wild type Cas9 domain) comprises one or more mutations that decreases the association between the Cas9 domain and a sugar-phosphate backbone of a DNA. In some embodiments, any of the Cas9 fusion proteins provided herein comprise one or more of a N497X, a R661X, a Q695X, and/or a Q926X mutation of the amino acid sequence provided in SEQ ID NO: 10, or a corresponding mutation in any of the amino acid sequences provided in SEQ ID NOs: 11-260, wherein X is any amino acid. In some embodiments, any of the Cas9 fusion proteins provided herein comprise one or more of a N497A, a R661A, a Q695A, and/or a Q926A mutation of the amino acid sequence provided in SEQ ID NO: 10, or a corresponding mutation in any of the amino acid sequences provided in SEQ ID NOs: 11-260. In some embodiments, the Cas9 domain comprises a D10A mutation of the amino acid sequence provided in SEQ ID NO: 10, or a corresponding mutation in any of the amino acid sequences provided in SEQ ID NOs: 11-260. In some embodiments, the Cas9 domain (e.g., of any of the fusion proteins provided herein) comprises the amino acid sequence as set forth in SEQ ID NO: 325. In some embodiments, the fusion protein comprises the amino acid sequence as set forth in SEQ ID NO: 285. Cas9 domains with high fidelity are known in the art and would be apparent to the skilled artisan. For example, Cas9 domains with high fidelity have been described in Kleinstiver, B. P., et al. “High-fidelity CRISPR-Cas9 nucleases with no detectable genome-wide off-target effects.” Nature 529, 490-495 (2016); and Slaymaker, I. M., et al. “Rationally engineered Cas9 nucleases with improved specificity.” Science 351, 84-88 (2015); the entire contents of each are incorporated herein by reference.

[0187] It should be appreciated that the base editors provided herein, for example base editor 2 (BE2) or base editor 3 (BE3), may be converted into high fidelity base editors by modifying the Cas9 domain as described herein to generate high fidelity base editors, for example high fidelity base editor 2 (HF-BE2) or high fidelity base editor 3 (HF-BE3). In some embodiments, base editor 2 (BE2) comprises a deaminase domain, a dCas9, and a UGI domain. In some embodiments, base editor 3 (BE3) comprises a deaminase domain an nCas9 domain and a UGI domain.

Cas9 domain where mutations relative to Cas9
of SEQ ID NO: 10 are shown in bold and
underlines
(SEQ ID NO: 325)
DKKYSIGLAIGTNSVGWAVITDEYKVPSKKFKVLGNTDRHSIKKN
LIGALLFDSGETAEATRLKRTARRRYTRRKNRICYLQEIFSNEMA
KVDDSFFHRLEESFLVEEDKKHERHPIFGNIVDEVAYHEKYPTIY
HLRKKLVDSTDKADLRLIYLALAHMIKFRGHFLIEGDLNPDNSDV
DKLFIQLVQTYNQLFEENPINASGVDAKAILSARLSKSRRLENLI
AQLPGEKKNGLFGNLIALSLGLTPNFKSNFDLAEDAKLQLSKDTY
DDDLDNLLAQIGDQYADLFLAAKNLSDAILLSDILRVNTEITKAP
LSASMIKRYDEHHQDLTLLKALVRQQLPEKYKEIFFDQSKNGYAG
YIDGGASQEEFYKFIKPILEKMDGTEELLVKLNREDLLRKQRTFD
NGSIPHQIHLGELHAILRRQEDFYPFLKDNREKIEKILTFRIPYY
VGPLARGNSRFAWMTRKSEETITPWNFEEVVDKGASAQSFIERMT
AFDKNLPNEKVLPKHSLLYEYFTVYNELTKVKYVTEGMRKPAFLS
GEQKKAIVDLLFKTNRKVTVKQLKEDYFKKIECFDSVEISGVEDR
FNASLGTYHDLLKIIKDKDFLDNEENEDILEDIVLTLTLFEDREM
IEERLKTYAHLFDDKVMKQLKRRRYTGWGALSRKLINGIRDKQSG
KTILDFLKSDGFANRNFMALIHDDSLTFKEDIQKAQVSGQGDSLH
EHIANLAGSPAIKKGILQTVKVVDELVKVMGRHKPENIVIEMARE
NQTTQKGQKNSRERMKRIEEGIKELGSQILKEHPVENTQLQNEKL
YLYYLQNGRDMYVDQELDINRLSDYDVDHIVPQSFLKDDSIDNKV
LTRSDKNRGKSDNVPSEEVVKKMKNYWRQLLNAKLITQRKFDNLT
KAERGGLSELDKAGFIKRQLVETRAITKHVAQILDSRMNTKYDEN
DKLIREVKVITLKSKLVSDFRKDFQFYKVREINNYHHAHDAYLNA
VVGTALIKKYPKLESEFVYGDYKVYDVRKMIAKSEQEIGKATAKY
FFYSNIMNFFKTEITLANGEIRKRPLIETNGETGEIVWDKGRDFA
TVRKVLSMPQVNIVKKTEVQTGGFSKESILPKRNSDKLIARKKDW
DPKKYGGFDSPTVAYSVLVVAKVEKGKSKKLKSVKELLGITIMER
SSFEKNPIDFLEAKGYKEVKKDLIIKLPKYSLFELENGRKRMLAS
AGELQKGNELALPSKYVNFLYLASHYEKLKGSPEDNEQKQLFVEQ
HKHYLDEIIEQISEFSKRVILADANLDKVLSAYNKHRDKPIREQA
ENIIHLFTLTNLGAPAAFKYFDTTIDRKRYTSTKEVLDATLIHQS
ITGLYETRIDLSQLGGD
HF-BE3
(SEQ ID NO: 285)
MSSETGPVAVDPTLRRRIEPHEFEVFFDPRELRKETCLLYEINWG
GRHSIWRHTSQNTNKHVEVNFIEKFTTERYFCPNTRCSITWFLSW
SPCGECSRAITEFLSRYPHVTLFIYIARLYHHADPRNRQGLRDLI
SSGVTIQIMTEQESGYCWRNFVNYSPSNEAHWPRYPHLWVRLYVL
ELYCIILGLPPCLNILRRKQPQLTFFTIALQSCHYQRLPPHILWA
TGLKSGSETPGTSESATPESDKKYSIGLAIGTNSVGWAVITDEYK
VPSKKFKVLGNTDRHSIKKNLIGALLFDSGETAEATRLKRTARRR
YTRRKNRICYLQEIFSNEMAKVDDSFFHRLEESFLVEEDKKHERH
PIFGNIVDEVAYHEKYPTIYHLRKKLVDSTDKADLRLIYLALAHM
IKFRGHFLIEGDLNPDNSDVDKLFIQLVQTYNQLFEENPINASGV
DAKAILSARLSKSRRLENLIAQLPGEKKNGLFGNLIALSLGLTPN
FKSNFDLAEDAKLQLSKDTYDDDLDNLLAQIGDQYADLFLAAKNL
SDAILLSDILRVNTEITKAPLSASMIKRYDEHHQDLTLLKALVRQ
QLPEKYKEIFFDQSKNGYAGYIDGGASQEEFYKFIKPILEKMDGT
EELLVKLNREDLLRKQRTFDNGSIPHQIHLGELHAILRRQEDFYP
FLKDNREKIEKILTFRIPYYVGPLARGNSRFAWMTRKSEETITPW
NFEEVVDKGASAQSFIERMTAFDKNLPNEKVLPKHSLLYEYFTVY
NELTKVKYVTEGMRKPAFLSGEQKKAIVDLLFKTNRKVTVKQLKE
DYFKKIECFDSVEISGVEDRFNASLGTYHDLLKIIKDKDFLDNEE
NEDILEDIVLTLTLFEDREMIEERLKTYAHLFDDKVMKQLKRRRY
TGWGALSRKLINGIRDKQSGKTILDFLKSDGFANRNFMALIHDDS
LTFKEDIQKAQVSGQGDSLHEHIANLAGSPAIKKGILQTVKVVDE
LVKVMGRHKPENIVIEMARENQTTQKGQKNSRERMKRIEEGIKEL
GSQILKEHPVENTQLQNEKLYLYYLQNGRDMYVDQELDINRLSDY
DVDHIVPQSFLKDDSIDNKVLTRSDKNRGKSDNVPSEEVVKKMKN
YWRQLLNAKLITQRKFDNLTKAERGGLSELDKAGFIKRQLVETRA
ITKHVAQILDSRMNTKYDENDKLIREVKVITLKSKLVSDFRKDFQ
FYKVREINNYHHAHDAYLNAVVGTALIKKYPKLESEFVYGDYKVY
DVRKMIAKSEQEIGKATAKYFFYSNIMNFFKTEITLANGEIRKRP
LIETNGETGEIVWDKGRDFATVRKVLSMPQVNIVKKTEVQTGGFS
KESILPKRNSDKLIARKKDWDPKKYGGFDSPTVAYSVLVVAKVEK
GKSKKLKSVKELLGITIMERSSFEKNPIDFLEAKGYKEVKKDLII
KLPKYSLFELENGRKRMLASAGELQKGNELALPSKYVNFLYLASH
YEKLKGSPEDNEQKQLFVEQHKHYLDEIIEQISEFSKRVILADAN
LDKVLSAYNKHRDKPIREQAENIIHLFTLTNLGAPAAFKYFDTTI
DRKRYTSTKEVLDATLIHQSITGLYETRIDLSQLGGD

### Cas9 Fusion Proteins

[0188] Any of the Cas9 domains (e.g., a nuclease active Cas9 protein, a nuclease-inactive dCas9 protein, or a Cas9 nickase protein) disclosed herein may be fused to a second protein, thus fusion proteins provided herein comprise a Cas9 domain as provided herein and a second protein, or a “fusion partner”. In some embodiments, the second protein is fused to the N-terminus of the Cas9 domain. However, in other embodiments, the second protein is fused to the C-terminus of the Cas9 domain. In some embodiments, the second protein that is fused to the Cas9 domain is a nucleic acid editing domain. In some embodiments, the Cas9 domain and the nucleic acid editing domain are fused via a linker, while in other embodiments the Cas9 domain and the nucleic acid editing domain are fused directly to one another. In some embodiments, the linker comprises (GGGS)ₙ (SEQ ID NO: 265), (GGGGS)ₙ (SEQ ID NO: 5), (G)ₙ, (EAAAK)ₙ (SEQ ID NO: 6), (GGS)ₙ, (SGGS)ₙ (SEQ ID NO: 4288), SGSETPGTSESATPES (SEQ ID NO: 7), or (XP)ₙ motif, or a combination of any of these, wherein n is independently an integer between 1 and 30, and wherein X is any amino acid. In some embodiments, the linker comprises a (GGS)ₙ motif, wherein n is 1, 3, or 7. In some embodiments, the linker comprises a (GGS)ₙ motif, wherein n is 1, 2, 3, 4, 5, 6, 7, 8, 9, 10, 11, 12, 13, 14, or 15. In some embodiments, the linker comprises an amino acid sequence of SGSETPGTSESATPES (SEQ ID NO: 7),also referred to as the XTEN linker in the Examples). The length of the linker can influence the base to be edited, as illustrated in the Examples. For example, a linker of 3-amino-acid long (e.g., (GGS)₁) may give a 2-5, 2-4, 2-3, 3-4 base editing window relative to the PAM sequence, while a 9-amino-acid linker (e.g., (GGS)₃ (SEQ ID NO: 596)) may give a 2-6, 2-5, 2-4, 2-3, 3-6, 3-5, 3-4, 4-6, 4-5, 5-6 base editing window relative to the PAM sequence. A 16-amino-acid linker (e.g., the XTEN linker) may give a 2-7, 2-6, 2-5, 2-4, 2-3, 3-7, 3-6, 3-5, 3-4, 4-7, 4-6, 4-5, 5-7, 5-6, 6-7 base window relative to the PAM sequence with exceptionally strong activity, and a 21-amino-acid linker (e.g., (GGS)₇ (SEQ ID NO: 597)) may give a 3-8, 3-7, 3-6, 3-5, 3-4, 4-8, 4-7, 4-6, 4-5, 5-8, 5-7, 5-6, 6-8, 6-7, 7-8 base editing window relative to the PAM sequence. The novel finding that varying linker length may allow the dCas9 fusion proteins of the disclosure to edit nucleobases different distances from the PAM sequence affords significant clinical importance, since a PAM sequence may be of varying distance to the disease-causing mutation to be corrected in a gene. It is to be understood that the linker lengths described as examples here are not meant to be limiting.

[0189] In some embodiments, the second protein comprises an enzymatic domain. In some embodiments, the enzymatic domain is a nucleic acid editing domain. Such a nucleic acid editing domain may be, without limitation, a nuclease, a nickase, a recombinase, a deaminase, a methyltransferase, a methylase, an acetylase, or an acetyltransferase. Non-limiting exemplary binding domains that may be used in accordance with this disclosure include transcriptional activator domains and transcriptional repressor domains.

### Deaminase Domains

[0190] In some embodiments, second protein comprises a nucleic acid editing domain. In some embodiments, the nucleic acid editing domain can catalyze a C to U base change. In some embodiments, the nucleic acid editing domain is a deaminase domain. In some embodiments, the deaminase is a cytidine deaminase or a cytidine deaminase. In some embodiments, the deaminase is an apolipoprotein B mRNA-editing complex (APOBEC) family deaminase. In some embodiments, the deaminase is an APOBEC1 deaminase. In some embodiments, the deaminase is an APOBEC2 deaminase. In some embodiments, the deaminase is an APOBEC3 deaminase. In some embodiments, the deaminase is an APOBEC3A deaminase. In some embodiments, the deaminase is an APOBEC3B deaminase. In some embodiments, the deaminase is an APOBEC3C deaminase. In some embodiments, the deaminase is an APOBEC3D deaminase. In some embodiments, the deaminase is an APOBEC3E deaminase. In some embodiments, the deaminase is an APOBEC3F deaminase. In some embodiments, the deaminase is an APOBEC3G deaminase. In some embodiments, the deaminase is an APOBEC3H deaminase. In some embodiments, the deaminase is an APOBEC4 deaminase. In some embodiments, the deaminase is an activation-induced deaminase (AID). In some embodiments, the deaminase is a vertebrate deaminase. In some embodiments, the deaminase is an invertebrate deaminase. In some embodiments, the deaminase is a human, chimpanzee, gorilla, monkey, cow, dog, rat, or mouse deaminase. In some embodiments, the deaminase is a human deaminase. In some embodiments, the deaminase is a rat deaminase, e.g., rAPOBEC1. In some embodiments, the deaminase is a Petromyzon marinus cytidine deaminase 1 (pmCDA1). In some embodiments, the deminase is a human APOBEC3G (SEQ ID NO: 275). In some embodiments, the deaminase is a fragment of the human APOBEC3G (SEQ ID NO: 5740). In some embodiments, the deaminase is a human APOBEC3G variant comprising a D316R_D317R mutation (SEQ ID NO: 5739). In some embodiments, the deaminase is a frantment of the human APOBEC3G and comprising mutations corresponding to the D316R_D317R mutations in SEQ ID NO: 275 (SEQ ID NO: 5741).

[0191] In some embodiments, the nucleic acid editing domain is at least 80%, at least 85%, at least 90%, at least 92%, at least 95%, at least 96%, at least 97%, at least 98%, at least 99%, or at least 99.5% identical to the deaminase domain of any one of SEQ ID NOs: 266-284, 607-610, 5724-5736, or 5738-5741. In some embodiments, the nucleic acid editing domain comprises the amino acid sequence of any one of SEQ ID NOs: 266-284, 607-610, 5724-5736, or 5738-5741.

Deaminase Domains that Modulate the Editing Window of Base Editors

[0192] Some aspects of the disclosure are based on the recognition that modulating the deaminase domain catalytic activity of any of the fusion proteins provided herein, for example by making point mutations in the deaminase domain, affect the processivity of the fusion proteins (e.g., base editors). For example, mutations that reduce, but do not eliminate, the catalytic activity of a deaminase domain within a base editing fusion protein can make it less likely that the deaminase domain will catalyze the deamination of a residue adjacent to a target residue, thereby narrowing the deamination window. The ability to narrow the deamination window may prevent unwanted deamination of residues adjacent of specific target residues, which may decrease or prevent off-target effects.

[0193] In some embodiments, any of the fusion proteins provided herein comprise a deaminase domain (e.g., a cytidine deaminase domain) that has reduced catalytic deaminase activity. In some embodiments, any of the fusion proteins provided herein comprise a deaminase domain (e.g., a cytidine deaminase domain) that has a reduced catalytic deaminase activity as compared to an appropriate control. For example, the appropriate control may be the deaminase activity of the deaminase prior to introducing one or more mutations into the deaminase. In other embodiments, the appropriate control may be a wild-type deaminase. In some embodiments, the appropriate control is a wild-type apolipoprotein B mRNA-editing complex (APOBEC) family deaminase. In some embodiments, the appropriate control is an APOBEC1 deaminase, an APOBEC2 deaminase, an APOBEC3A deaminase, an APOBEC3B deaminase, an APOBEC3C deaminase, an APOBEC3D deaminase, an APOBEC3F deaminase, an APOBEC3G deaminase, or an APOBEC3H deaminase. In some embodiments, the appropriate control is an activation induced deaminase (AID). In some embodiments, the appropriate control is a cytidine deaminase 1 from Petromyzon marinus (pmCDA1). In some embodiments, the deaminse domain may be a deaminase domain that has at least 1%, at least 5%, at least 15%, at least 20%, at least 25%, at least 30%, at least 40%, at least 50%, at least 60%, at lest 70%, at least 80%, at least 90%, or at least 95% less catalytic deaminase activity as compared to an appropriate control.

[0194] In some embodiments, any of the fusion proteins provided herein comprise an APOBEC deaminase comprising one or more mutations selected from the group consisting of H121X, H122X, R126X, R126X, R118X, W90X, W90X, and R132X of rAPOBEC1 (SEQ ID NO: 284), or one or more corresponding mutations in another APOBEC deaminase, wherein X is any amino acid. In some embodiments, any of the fusion proteins provided herein comprise an APOBEC deaminase comprising one or more mutations selected from the group consisting of H121R, H122R, R126A, R126E, R118A, W90A, W90Y, and R132E of rAPOBEC1 (SEQ ID NO: 284), or one or more corresponding mutations in another APOBEC deaminase.

[0195] In some embodiments, any of the fusion proteins provided herein comprise an APOBEC deaminase comprising one or more mutations selected from the group consisting of D316X, D317X, R320X, R320X, R313X, W285X, W285X, R326X of hAPOBEC3G (SEQ ID NO: 275), or one or more corresponding mutations in another APOBEC deaminase, wherein X is any amino acid. In some embodiments, any of the fusion proteins provided herein comprise an APOBEC deaminase comprising one or more mutations selected from the group consisting of D316R, D317R, R320A, R320E, R313A, W285A, W285Y, R326E of hAPOBEC3G (SEQ ID NO: 275), or one or more corresponding mutations in another APOBEC deaminase.

[0196] In some embodiments, any of the fusion proteins provided herein comprise an APOBEC deaminase comprising a H121R and a H122R mutation of rAPOBEC1 (SEQ ID NO: 284), or one or more corresponding mutations in another APOBEC deaminase. In some embodiments, any of the fusion proteins provided herein comprise an APOBEC deaminase comprising a R126A mutation of rAPOBEC1 (SEQ ID NO: 284), or one or more corresponding mutations in another APOBEC deaminase. In some embodiments, any of the fusion proteins provided herein comprise an APOBEC deaminase comprising a R126E mutation of rAPOBEC1 (SEQ ID NO: 284), or one or more corresponding mutations in another APOBEC deaminase. In some embodiments, any of the fusion proteins provided herein comprise an APOBEC deaminase comprising a R118A mutation of rAPOBEC1 (SEQ ID NO: 284), or one or more corresponding mutations in another APOBEC deaminase. In some embodiments, any of the fusion proteins provided herein comprise an APOBEC deaminase comprising a W90A mutation of rAPOBEC1 (SEQ ID NO: 284), or one or more corresponding mutations in another APOBEC deaminase. In some embodiments, any of the fusion proteins provided herein comprise an APOBEC deaminase comprising a W90Y mutation of rAPOBEC1 (SEQ ID NO: 284), or one or more corresponding mutations in another APOBEC deaminase. In some embodiments, any of the fusion proteins provided herein comprise an APOBEC deaminase comprising a R132E mutation of rAPOBEC1 (SEQ ID NO: 284), or one or more corresponding mutations in another APOBEC deaminase. In some embodiments, any of the fusion proteins provided herein comprise an APOBEC deaminase comprising a W90Y and a R126E mutation of rAPOBEC1 (SEQ ID NO: 284), or one or more corresponding mutations in another APOBEC deaminase. In some embodiments, any of the fusion proteins provided herein comprise an APOBEC deaminase comprising a R126E and a R132E mutation of rAPOBEC1 (SEQ ID NO: 284), or one or more corresponding mutations in another APOBEC deaminase. In some embodiments, any of the fusion proteins provided herein comprise an APOBEC deaminase comprising a W90Y and a R132E mutation of rAPOBEC1 (SEQ ID NO: 284), or one or more corresponding mutations in another APOBEC deaminase. In some embodiments, any of the fusion proteins provided herein comprise an APOBEC deaminase comprising a W90Y, R126E, and R132E mutation of rAPOBEC1 (SEQ ID NO: 284), or one or more corresponding mutations in another APOBEC deaminase.

[0197] In some embodiments, any of the fusion proteins provided herein comprise an APOBEC deaminase comprising a D316R and a D317R mutation of hAPOBEC3G (SEQ ID NO: 275), or one or more corresponding mutations in another APOBEC deaminase. In some embodiments, any of the fusion proteins provided herein comprise an APOBEC deaminase comprising a R320A mutation of hAPOBEC3G (SEQ ID NO: 275), or one or more corresponding mutations in another APOBEC deaminase. In some embodiments, any of the fusion proteins provided herein comprise an APOBEC deaminase comprising a R320E mutation of hAPOBEC3G (SEQ ID NO: 275), or one or more corresponding mutations in another APOBEC deaminase. In some embodiments, any of the fusion proteins provided herein comprise an APOBEC deaminase comprising a R313A mutation of hAPOBEC3G (SEQ ID NO: 275), or one or more corresponding mutations in another APOBEC deaminase. In some embodiments, any of the fusion proteins provided herein comprise an APOBEC deaminase comprising a W285A mutation of hAPOBEC3G (SEQ ID NO: 275), or one or more corresponding mutations in another APOBEC deaminase. In some embodiments, any of the fusion proteins provided herein comprise an APOBEC deaminase comprising a W285Y mutation of hAPOBEC3G (SEQ ID NO: 275), or one or more corresponding mutations in another APOBEC deaminase. In some embodiments, any of the fusion proteins provided herein comprise an APOBEC deaminase comprising a R326E mutation of hAPOBEC3G (SEQ ID NO: 275), or one or more corresponding mutations in another APOBEC deaminase. In some embodiments, any of the fusion proteins provided herein comprise an APOBEC deaminase comprising a W285Y and a R320E mutation of hAPOBEC3G (SEQ ID NO: 275), or one or more corresponding mutations in another APOBEC deaminase. In some embodiments, any of the fusion proteins provided herein comprise an APOBEC deaminase comprising a R320E and a R326E mutation of hAPOBEC3G (SEQ ID NO: 275), or one or more corresponding mutations in another APOBEC deaminase. In some embodiments, any of the fusion proteins provided herein comprise an APOBEC deaminase comprising a W285Y and a R326E mutation of hAPOBEC3G (SEQ ID NO: 275), or one or more corresponding mutations in another APOBEC deaminase. In some embodiments, any of the fusion proteins provided herein comprise an APOBEC deaminase comprising a W285Y, R320E, and R326E mutation of hAPOBEC3G (SEQ ID NO: 275), or one or more corresponding mutations in another APOBEC deaminase.

[0198] Some aspects of this disclosure provide fusion proteins comprising (i) a nuclease-inactive Cas9 domain; and (ii) a nucleic acid editing domain. In some embodiments, a nuclease-inactive Cas9 domain (dCas9), comprises an amino acid sequence that is at least 80%, at least 85%, at least 90%, at least 92%, at least 95%, at least 96%, at least 97%, at least 98%, at least 99%, or at least 99.5% identical to the amino acid sequence of a Cas9 as provided by any one of SEQ ID NOs: 10-263, and comprises mutations that inactivate the nuclease activity of Cas9. Mutations that render the nuclease domains of Cas9 inactive are well-known in the art. For example, the DNA cleavage domain of Cas9 is known to include two subdomains, the HNH nuclease subdomain and the RuvC1 subdomain. The HNH subdomain cleaves the strand complementary to the gRNA, whereas the RuvC1 subdomain cleaves the non-complementary strand. Mutations within these subdomains can silence the nuclease activity of Cas9. For example, the mutations D10A and H840A completely inactivate the nuclease activity of S. pyogenes Cas9 (Jinek et al., Science. 337:816-821(2012); Qi et al., Cell. 28; 152(5):1173-83 (2013)). In some embodiments, the dCas9 of this disclosure comprises a D10A mutation of the amino acid sequence provided in SEQ ID NO: 10, or a corresponding mutation in any of the amino acid sequences provided in SEQ ID NOs: 11-260. In some embodiments, the dCas9 of this disclosure comprises a H840A mutation of the amino acid sequence provided in SEQ ID NO: 10, or a corresponding mutation in any of the amino acid sequences provided in SEQ ID NOs: 11-260. In some embodiments, the dCas9 of this disclosure comprises both D10A and H840A mutations of the amino acid sequence provided in SEQ ID NO: 10, or a corresponding mutation in any of the amino acid sequences provided in SEQ ID NOs: 11-260. In some embodiments, the Cas9 further comprises a histidine residue at position 840 of the amino acid sequence provided in SEQ ID NO: 10, or a corresponding mutation in any of the amino acid sequences provided in SEQ ID NOs: 11-260. The presence of the catalytic residue H840 restores the activity of the Cas9 to cleave the non-edited strand containing a G opposite the targeted C. Restoration of H840 does not result in the cleavage of the target strand containing the C. In some embodiments, the dCas9 comprises an amino acid sequence of SEQ ID NO: 263. It is to be understood that other mutations that inactivate the nuclease domains of Cas9 may also be included in the dCas9 of this disclosure.

[0199] The Cas9 or dCas9 domains comprising the mutations disclosed herein, may be a full-length Cas9, or a fragment thereof. In some embodiments, proteins comprising Cas9, or fragments thereof, are referred to as “Cas9 variants.” A Cas9 variant shares homology to Cas9, or a fragment thereof. For example a Cas9 variant is at least about 70% identical, at least about 80% identical, at least about 90% identical, at least about 95% identical, at least about 96% identical, at least about 97% identical, at least about 98% identical, at least about 99% identical, at least about 99.5% identical, or at least about 99.9% to wild type Cas9. In some embodiments, the Cas9 variant comprises a fragment of Cas9 (e.g., a gRNA binding domain or a DNA-cleavage domain), such that the fragment is at least about 70% identical, at least about 80% identical, at least about 90% identical, at least about 95% identical, at least about 96% identical, at least about 97% identical, at least about 98% identical, at least about 99% identical, at least about 99.5% identical, or at least about 99.9% identical to the corresponding fragment of wild type Cas9, e.g., a Cas9 comprising the amino acid sequence of SEQ ID NO: 10.

[0200] Any of the Cas9 fusion proteins of this disclosure may further comprise a nucleic acid editing domain (e.g., an enzyme that is capable of modifying nucleic acid, such as a deaminase). In some embodiments, the nucleic acid editing domain is a DNA-editing domain. In some embodiments, the nucleic acid editing domain has deaminase activity. In some embodiments, the nucleic acid editing domain comprises or consists of a deaminase or deaminase domain. In some embodiments, the deaminase is a cytidine deaminase. In some embodiments, the deaminase is an apolipoprotein B mRNA-editing complex (APOBEC) family deaminase. In some embodiments, the deaminase is an APOBEC1 family deaminase. In some embodiments, the deaminase is an activation-induced cytidine deaminase (AID). Some nucleic-acid editing domains as well as Cas9 fusion proteins including such domains are described in detail herein. Additional suitable nucleic acid editing domains will be apparent to the skilled artisan based on this disclosure and knowledge in the field.

[0201] Some aspects of the disclosure provide a fusion protein comprising a Cas9 domain fused to a nucleic acid editing domain, wherein the nucleic acid editing domain is fused to the N-terminus of the Cas9 domain. In some embodiments, the Cas9 domain and the nucleic acid editing-editing domain are fused via a linker. In some embodiments, the linker comprises a (GGGS)ₙ(SEQ ID NO: 265), a (GGGGS)ₙ (SEQ ID NO: 5), a (G)ₙ, an (EAAAK)ₙ (SEQ ID NO: 6), a (GGS)ₙ, (SGGS)ₙ(SEQ ID NO: 4288), an SGSETPGTSESATPES (SEQ ID NO: 7) motif (see, e.g., Guilinger J P, Thompson D B, Liu D R. Fusion of catalytically inactive Cas9 to FokI nuclease improves the specificity of genome modification. Nat. Biotechnol. 2014; 32(6): 577-82; the entire contents are incorporated herein by reference), or an (XP)ₙ motif, or a combination of any of these, wherein n is independently an integer between 1 and 30. In some embodiments, n is independently 1, 2, 3, 4, 5, 6, 7, 8, 9, 10, 11, 12, 13, 14, 15, 16, 17, 18, 19, 20, 21, 22, 23, 24, 25, 26, 27, 28, 29, or 30, or, if more than one linker or more than one linker motif is present, any combination thereof. In some embodiments, the linker comprises a (GGS)ₙ motif, wherein n is 1, 2, 3, 4, 5, 6, 7, 8, 9, 10, 11, 12, 13, 14 or 15. In some embodiments, the linker comprises a (GGS)ₙ motif, wherein n is 1, 3, or 7. In some embodiments, the linker comprises the amino acid sequence SGSETPGTSESATPES (SEQ ID NO: 7). Additional suitable linker motifs and linker configurations will be apparent to those of skill in the art. In some embodiments, suitable linker motifs and configurations include those described in Chen et al., Fusion protein linkers: property, design and functionality. Adv Drug Deliv Rev. 2013; 65(10):1357-69, the entire contents of which are incorporated herein by reference. Additional suitable linker sequences will be apparent to those of skill in the art based on the instant disclosure. In some embodiments, the general architecture of exemplary Cas9 fusion proteins provided herein comprises the structure:
[0202] [NH₂]-[nucleic acid editing domain]-[Cas9]-[COOH] or
[0203] [NH₂]-[nucleic acid editing domain]-[linker]-[Cas9]-[COOH],
   wherein NH₂ is the N-terminus of the fusion protein, and COOH is the C-terminus of the fusion protein.

[0204] The fusion proteins of the present disclosure may comprise one or more additional features. For example, in some embodiments, the fusion protein comprises a nuclear localization sequence (NLS). In some embodiments, the NLS of the fusion protein is localized between the nucleic acid editing domain and the Cas9 domain. In some embodiments, the NLS of the fusion protein is localized C-terminal to the Cas9 domain.

[0205] Other exemplary features that may be present are localization sequences, such as cytoplasmic localization sequences, export sequences, such as nuclear export sequences, or other localization sequences, as well as sequence tags that are useful for solubilization, purification, or detection of the fusion proteins. Suitable protein tags provided herein include, but are not limited to, biotin carboxylase carrier protein (BCCP) tags, myc-tags, calmodulin-tags, FLAG-tags, hemagglutinin (HA)-tags, polyhistidine tags, also referred to as histidine tags or His-tags, maltose binding protein (MBP)-tags, nus-tags, glutathione-S-transferase (GST)-tags, green fluorescent protein (GFP)-tags, thioredoxin-tags, S-tags, Softags (e.g., Softag 1, Softag 3), strep-tags, biotin ligase tags, FlAsH tags, V5 tags, and SBP-tags. Additional suitable sequences will be apparent to those of skill in the art. In some embodiments, the fusion protein comprises one or more His tags.

[0206] In some embodiments, the nucleic acid editing domain is a deaminase. For example, in some embodiments, the general architecture of exemplary Cas9 fusion proteins with a deaminase domain comprises the structure:
[0207] [NH₂]-[NLS]-[deaminase]-[Cas9]-[COOH],
[0208] [NH₂]-[Cas9]-[deaminase]-[COOH],
[0209] [NH₂]-[deaminase]-[Cas9]-[COOH], or
[0210] [NH₂]-[deaminase]-[Cas9]-[NLS]-[COOH]
   wherein NLS is a nuclear localization sequence, NH₂ is the N-terminus of the fusion protein, and COOH is the C-terminus of the fusion protein. Nuclear localization sequences are known in the art and would be apparent to the skilled artisan. For example, NLS sequences are described in Plank et al., PCT/EP2000/011690, the contents of which are incorporated herein by reference for their disclosure of exemplary nuclear localization sequences. In some embodiments, a NLS comprises the amino acid sequence PKKKRKV (SEQ ID NO: 741) or MDSLLMNRRKFLYQFKNVRWAKGRRETYLC (SEQ ID NO: 742). In some embodiments, a linker is inserted between the Cas9 and the deaminase. In some embodiments, the NLS is located C-terminal of the Cas9 domain. In some embodiments, the NLS is located N-terminal of the Cas9 domain. In some embodiments, the NLS is located between the deaminase and the Cas9 domain. In some embodiments, the NLS is located N-terminal of the deaminase domain. In some embodiments, the NLS is located C-terminal of the deaminase domain.

[0211] One exemplary suitable type of nucleic acid editing domain is a cytidine deaminase, for example, of the APOBEC family. The apolipoprotein B mRNA-editing complex (APOBEC) family of cytidine deaminase enzymes encompasses eleven proteins that serve to initiate mutagenesis in a controlled and beneficial manner.²⁹ One family member, activation-induced cytidine deaminase (AID), is responsible for the maturation of antibodies by converting cytosines in ssDNA to uracils in a transcription-dependent, strand-biased fashion.³⁰ The apolipoprotein B editing complex 3 (APOBEC3) enzyme provides protection to human cells against a certain HIV-1 strain via the deamination of cytosines in reverse-transcribed viral ssDNA.³¹ These proteins all require a Zn²⁺-coordinating motif (His-X-Glu-X₂₃₋₂₆-Pro-Cys-X₂₋₄-Cys; SEQ ID NO: 598) and bound water molecule for catalytic activity. The Glu residue acts to activate the water molecule to a zinc hydroxide for nucleophilic attack in the deamination reaction. Each family member preferentially deaminates at its own particular “hotspot”, ranging from WRC (W is A or T, R is A or G) for hAID, to TTC for hAPOBEC3F.³² A recent crystal structure of the catalytic domain of APOBEC3G revealed a secondary structure comprised of a five-stranded β-sheet core flanked by six α-helices, which is believed to be conserved across the entire family.³³ The active center loops have been shown to be responsible for both ssDNA binding and in determining “hotspot” identity.³⁴ Overexpression of these enzymes has been linked to genomic instability and cancer, thus highlighting the importance of sequence-specific targeting.³⁵

[0212] Some aspects of this disclosure relate to the recognition that the activity of cytidine deaminase enzymes such as APOBEC enzymes can be directed to a specific site in genomic DNA. Without wishing to be bound by any particular theory, advantages of using Cas9 as a recognition agent include (1) the sequence specificity of Cas9 can be easily altered by simply changing the sgRNA sequence; and (2) Cas9 binds to its target sequence by denaturing the dsDNA, resulting in a stretch of DNA that is single-stranded and therefore a viable substrate for the deaminase. It should be understood that other catalytic domains, or catalytic domains from other deaminases, can also be used to generate fusion proteins with Cas9, and that the disclosure is not limited in this regard.

[0213] Some aspects of this disclosure are based on the recognition that Cas9:deaminase fusion proteins can efficiently deaminate nucleotides at positions 3-11 according to the numbering scheme in FIG. 3. In view of the results provided herein regarding the nucleotides that can be targeted by Cas9:deaminase fusion proteins, a person of skill in the art will be able to design suitable guide RNAs to target the fusion proteins to a target sequence that comprises a nucleotide to be deaminated.

[0214] In some embodiments, the deaminase domain and the Cas9 domain are fused to each other via a linker. Various linker lengths and flexibilities between the deaminase domain (e.g., AID) and the Cas9 domain can be employed (e.g., ranging from very flexible linkers of the form (GGGGS)ₙ (SEQ ID NO: 5), (GGS)ₙ, and (G)ₙ to more rigid linkers of the form (EAAAK)ₙ (SEQ ID NO: 6), (SGGS)ₙ(SEQ ID NO: 4288), SGSETPGTSESATPES (SEQ ID NO: 7) (see, e.g., Guilinger J P, Thompson D B, Liu D R. Fusion of catalytically inactive Cas9 to FokI nuclease improves the specificity of genome modification. Nat. Biotechnol. 2014; 32(6): 577-82; the entire contents are incorporated herein by reference) and (XP)ₙ)³⁶ in order to achieve the optimal length for deaminase activity for the specific application. In some embodiments, the linker comprises a (GGS)ₙ motif, wherein n is 1, 3, or 7. In some embodiments, the linker comprises a (an SGSETPGTSESATPES (SEQ ID NO: 7) motif.

[0215] Some exemplary suitable nucleic-acid editing domains, e.g., deaminases and deaminase domains, that can be fused to Cas9 domains according to aspects of this disclosure are provided below. It should be understood that, in some embodiments, the active domain of the respective sequence can be used, e.g., the domain without a localizing signal (nuclear localization sequence, without nuclear export signal, cytoplasmic localizing signal).

Human AID:
(SEQ ID NO: 266)
[sequence omitted]
(underline: nuclear localization sequence;
double underline: nuclear export signal)
Mouse AID:
(SEQ ID NO: 267)
MDSLLMKQKKFLYHFKNVRWAKGRHETYLCYVVKRRDSATSCSLDFGHLRNKSGCHVELL
FLRYISDWDLDPGRCYRVTWFTSWSPCYDCARHVAEFLRWNPNLSLRIFTARLYFCEDRK
AEPEGLRRLHRAGVQIGIMTFKDYFYCWNTFVENRERTFKAWEGLHENSVRLTRQLRRIL
LPLYEVDDLRDAFRMLGE
(underline: nuclear localization sequence;
double underline: nuclear export signal)
Dog AID:
(SEQ ID NO: 268)
MDSLLMKQRKFLYHFKNVRWAKGRHETYLCYVVKRRDSATSFSLDFGHLRNKSGCHVELL
FLRYISDWDLDPGRCYRVTWFTSWSPCYDCARHVADFLRGYPNLSLRIFAARLYFCEDRK
AEPEGLRRLHRAGVQIAIMTFKDYFYCWNTFVENREKTFKAWEGLHENSVRLSRQLRRIL
LPLYEVDDLRDAFRTLGL
(underline: nuclear localization sequence;
double underline: nuclear export signal)
Bovine AID:
(SEQ ID NO: 269)
MDSLLKKQRQFLYQFKNVRWAKGRHETYLCYVVKRRDSPTSFSLDFGHLRNKAGCHVELL
FLRYISDWDLDPGRCYRVTWFTSWSPCYDCARHVADFLRGYPNLSLRIFTARLYFCDKER
KAEPEGLRRLHRAGVQIAIMTFKDYFYCWNTFVENHERTFKAWEGLHENSVRLSRQLRRI
LLPLYEVDDLRDAFRTLGL
(underline: nuclear localization sequence;
double underline: nuclear export signal)
Rat AID
(SEQ ID NO: 5725)
MAVGSKPKAALVGPHWERERIWCFLCSTGLGTQQTGQTSRWLRPAATQDPVSPPRSLLMK
QRKFLYHFKNVRWAKGRHETYLCYVVKRRDSATSFSLDFGYLRNKSGCHVELLFLRYISD
WDLDPGRCYRVTWFTSWSPCYDCARHVADFLRGNPNLSLRIFTARLTGWGALPAGLMSPA
RPSDYFYCWNTFVENHERTFKAWEGLHENSVRLSRRLRRILLPLYEVDDLRDAFRTLGL
(underline: nuclear localization sequence;
double underline: nuclear export signal)
Mouse APOBEC-3:
(SEQ ID NO: 270)
MGPFCLGCSHRKCYSPIRNLISQETFKFHFKNLGYAKGRKDTFLCYEVTRKDCDSPVSLH
HGVFKNKDNIHAEICFLYWFHDKVLKVLSPREEFKITWYMSWSPCFECAEQIVRFLATHH
NLSLDIFSSRLYNVQDPETQQNLCRLVQEGAQVAAMDLYEFKKCWKKFVDNGGRRFRPWK
RLLTNFRYQDSKLQEILRPCYIPVPSSSSSTLSNICLTKGLPETRFCVEGRRMDPLSEEE
FYSQFYNQRVKHLCYYHRMKPYLCYQLEQFNGQAPLKGCLLSEKGKQHAEILFLDKIRSM
ELSQVTITCYLTWSPCPNCAWQLAAFKRDRPDLILHIYTSRLYFHWKRPFQKGLCSLWQS
GILVDVMDLPQFTDCWTNFVNPKRPFWPWKGLEIISRRTQRRLRRIKESWGLQDLVNDFG
NLQLGPPMS
(italic: nucleic acid editing domain)
Rat APOBEC-3:
(SEQ ID NO: 271)
MGPFCLGCSHRKCYSPIRNLISQETFKFHFKNLRYAIDRKDTFLCYEVTRKDCDSPVSLH
HGVFKNKDNIHAEICFLYWFHDKVLKVLSPREEFKITWYMSWSPCFECAEQVLRFLATHH
NLSLDIFSSRLYNIRDPENQQNLCRLVQEGAQVAAMDLYEFKKCWKKFVDNGGRRFRPWK
KLLTNFRYQDSKLQEILRPCYIPVPSSSSSTLSNICLTKGLPETRFCVERRRVHLLSEEE
FYSQFYNQRVKHLCYYHGVKPYLCYQLEQFNGQAPLKGCLLSEKGKQHAEILFLDKIRSM
ELSQVIITCYLTWSPCPNCAWQLAAFKRDRPDLILHIYTSRLYFHWKRPFQKGLCSLWQS
GILVDVMDLPQFTDCWTNFVNPKRPFWPWKGLEIISRRTQRRLHRIKESWGLQDLVNDFG
NLQLGPPMS
(italic: nucleic acid editing domain)
Rhesus macaque APOBEC-3G:
(SEQ ID NO: 272)
MVEPMDPRTFVSNENNRPILSGLNTVWLCCEVKTKDPSGPPLDAKIFQGKVYSKAKYHPE
MRFLRWFHKWRQLHHDQEYKVTWYVSWSPCTRCANSVATFLAKDPKVTLTIFVARLYYFW
KPDYQQALRILCQKRGGPHATMKIMNYNEFQDCWNKFVDGRGKPFKPRNNLPKHYTLLQA
TLGELLRHLMDPGTFTSNFNNKPWVSGQHETYLCYKVERLHNDTWVPLNQHRGFLRNQAP
NIHGFPKGRHAELCFLDLIPFWKLDGQQYRVTCFTSWSPCFSCAQEMAKFISNNEHVSLC
IFAARIYDDQGRYQEGLRALHRDGAKIAMMNYSEFEYCWDTFVDRQGRPFQPWDGLDEHS
QALSGRLRAI
(italic: nucleic acid editing domain;
underline: cytoplasmic localization signal)
Chimpanzee APOBEC-3G:
(SEQ ID NO: 273)
MKPHFRNPVERMYQDTFSDNFYNRPILSHRNTVWLCYEVKTKGPSRPPLDAKIFRGQVYS
KLKYHPEMRFFHWFSKWRKLHRDQEYEVTWYISWSPCTKCTRDVATFLAEDPKVTLTIFV
ARLYYFWDPDYQEALRSLCQKRDGPRATMKIMNYDEFQHCWSKFVYSQRELFEPWNNLPK
YYILLHIMLGEILRHSMDPPTFTSNFNNELWVRGRHETYLCYEVERLHNDTWVLLNQRRG
FLCNQAPHKHGFLEGRHAELCFLDVIPFWKLDLHQDYRVTCFTSWSPCFSCAQEMAKFIS
NNKHVSLCIFAARIYDDQGRCQEGLRTLAKAGAKISIMTYSEFKHCWDTFVDHQGCPFQP
WDGLEEHSQALSGRLRAILQNQGN
(italic: nucleic acid editing domain;
underline: cytoplasmic localization signal)
Green monkey APOBEC-3G:
(SEQ ID NO: 274)
MNPQIRNMVEQMEPDIFVYYFNNRPILSGRNTVWLCYEVKTKDPSGPPLDANIFQGKLYP
EAKDHPEMKFLHWFRKWRQLHRDQEYEVTWYVSWSPCTRCANSVATFLAEDPKVTLTIFV
ARLYYFWKPDYQQALRILCQERGGPHATMKIMNYNEFQHCWNEFVDGQGKPFKPRKNLPK
HYTLLHATLGELLRHVMDPGTFTSNFNNKPWVSGQRETYLCYKVERSHNDTWVLLNQHRG
FLRNQAPDRHGFPKGRHAELCFLDLIPFWKLDDQQYRVTCFTSWSPCFSCAQKMAKFISN
NKHVSLCIFAARIYDDQGRCQEGLRTLHRDGAKIAVMNYSEFEYCWDTFVDRQGRPFQPW
DGLDEHSQALSGRLRAI
(italic: nucleic acid editing domain;
underline: cytoplasmic localization signal)
Human APOBEC-3G:
(SEQ ID NO: 275)
MKPHFRNTVERMYRDTFSYNFYNRPILSRRNTVWLCYEVKTKGPSRPPLDAKIFRGQVYS
ELKYHPEMRFFHWFSKWRKLHRDQEYEVTWYISWSPCTKCTRDMATFLAEDPKVTLTIFV
ARLYYFWDPDYQEALRSLCQKRDGPRATMKIMNYDEFQHCWSKFVYSQRELFEPWNNLPK
YYILLHIMLGEILRHSMDPPTFTFNFNNEPWVRGRHETYLCYEVERMHNDTWVLLNQRRG
FLCNQAPHKHGFLEGRHAELCFLDVIPFWKLDLDQDYRVTCFTSWSPCFSCAQEMAKFIS
KNKHVSLCIFTARIYDDQGRCQEGLRTLAEAGAKISIMTYSEFKHCWDTFVDHQGCPFQP
WDGLDEHSQDLSGRLRAILQNQEN
(italic: nucleic acid editing domain;
underline: cytoplasmic localization signal)
Human APOBEC-3F:
(SEQ ID NO: 276)
MKPHFRNTVERMYRDTFSYNFYNRPILSRRNTVWLCYEVKTKGPSRPRLDAKIFRGQVYS
QPEHHAEMCFLSWFCGNQLPAYKCFQITWFVSWTPCPDCVAKLAEFLAEHPNVTLTISAA
RLYYYWERDYRRALCRLSQAGARVKIMDDEEFAYCWENFVYSEGQPFMPWYKFDDNYAFL
HRTLKEILRNPMEAMYPHIFYFHFKNLRKAYGRNESWLCFTMEVVKHHSPVSWKRGVFRN
QVDPETHCHAERCFLSWFCDDILSPNTNYEVTWYTSWSPCPECAGEVAEFLARHSNVNLT
IFTARLYYFWDTDYQEGLRSLSQEGASVEIMGYKDFKYCWENFVYNDDEPFKPWKGLKYN
FLFLDSKLQEILE
(italic: nucleic acid editing domain)
Human APOBEC-3B:
(SEQ ID NO: 277)
MNPQIRNPMERMYRDTFYDNFENEPILYGRSYTWLCYEVKIKRGRSNLLWDTGVFRGQVY
FKPQYHAEMCFLSWFCGNQLPAYKCFQITWFVSWTPCPDCVAKLAEFLSEHPNVTLTISA
ARLYYYWERDYRRALCRLSQAGARVTIMDYEEFAYCWENFVYNEGQQFMPWYKFDENYAF
LHRTLKEILRYLMDPDTFTFNFNNDPLVLRRRQTYLCYEVERLDNGTWVLMDQHMGFLCN
EAKNLLCGFYGRHAELRFLDLVPSLQLDPAQIYRVTWFISWSPCFSWGCAGEVRAFLQEN
THVRLRIFAARIYDYDPLYKEALQMLRDAGAQVSIMTYDEFEYCWDTFVYRQGCPFQPWD
GLEEHSQALSGRLRAILQNQGN
(italic: nucleic acid editing domain)
Rat APOBEC-3B:
(SEQ ID NO: 5729)
MQPQGLGPNAGMGPVCLGCSHRRPYSPIRNPLKKLYQQTFYFHFKNVRYAWGRKNNFLCY
EVNGMDCALPVPLRQGVFRKQGHIHAELCFIYWFHDKVLRVLSPMEEFKVTWYMSWSPCS
KCAEQVARFLAAHRNLSLAIFSSRLYYYLRNPNYQQKLCRLIQEGVHVAAMDLPEFKKCW
NKFVDNDGQPFRPWMRLRINFSFYDCKLQEIFSRMNLLREDVFYLQFNNSHRVKPVQNRY
YRRKSYLCYQLERANGQEPLKGYLLYKKGEQHVEILFLEKMRSMELSQVRITCYLTWSPC
PNCARQLAAFKKDHPDLILRIYTSRLYFYWRKKFQKGLCTLWRSGIHVDVMDLPQFADCW
TNFVNPQRPFRPWNELEKNSWRIQRRLRRIKESWGL
Bovine APOBEC-3B:
(SEQ ID NO: 5730)
DGWEVAFRSGTVLKAGVLGVSMTEGWAGSGHPGQGACVWTPGTRNTMNLLREVLFKQQFG
NQPRVPAPYYRRKTYLCYQLKQRNDLTLDRGCFRNKKQRHAEIRFIDKINSLDLNPSQSY
KIICYITWSPCPNCANELVNFITRNNHLKLEIFASRLYFHWIKSFKMGLQDLQNAGISVA
VMTHTEFEDCWEQFVDNQSRPFQPWDKLEQYSASIRRRLQRILTAPI
Chimpanzee APOBEC-3B:
(SEQ ID NO: 5731)
MNPQIRNPMEWMYQRTFYYNFENEPILYGRSYTWLCYEVKIRRGHSNLLWDTGVFRGQMY
SQPEHHAEMCFLSWFCGNQLSAYKCFQITWFVSWTPCPDCVAKLAKFLAEHPNVTLTISA
ARLYYYWERDYRRALCRLSQAGARVKIMDDEEFAYCWENFVYNEGQPFMPWYKFDDNYAF
LHRTLKEIIRHLMDPDTFTFNFNNDPLVLRRHQTYLCYEVERLDNGTWVLMDQHMGFLCN
EAKNLLCGFYGRHAELRFLDLVPSLQLDPAQIYRVTWFISWSPCFSWGCAGQVRAFLQEN
THVRLRIFAARIYDYDPLYKEALQMLRDAGAQVSIMTYDEFEYCWDTFVYRQGCPFQPWD
GLEEHSQALSGRLRAILQVRASSLCMVPHRPPPPPQSPGPCLPLCSEPPLGSLLPTGRPA
PSLPFLLTASFSFPPPASLPPLPSLSLSPGHLPVPSFHSLTSCSIQPPCSSRIRETEGWA
SVSKEGRDLG
Human APOBEC-3C:
(SEQ ID NO: 278)
MNPQIRNPMKAMYPGTFYFQFKNLWEANDRNETWLCFTVEGIKRRSVVSWKTGVFRNQVD
SETHCHAERCFLSWFCDDILSPNTKYQVTWYTSWSPCPDCAGEVAEFLARHSNVNLTIFT
ARLYYFQYPCYQEGLRSLSQEGVAVEIMDYEDFKYCWENFVYNDNEPFKPWKGLKTNFRL
LKRRLRESLQ
(italic: nucleic acid editing domain)
Gorilla APOBEC3C
(SEQ ID NO: 5726)
MNPQIRNPMKAMYPGTFYFQFKNLWEANDRNETWLCFTVEGIKRRSVVSWKTGVFRNQVD
SETHCHAERCFLSWFCDDILSPNTNYQVTWYTSWSPCPECAGEVAEFLARHSNVNLTIFT
ARLYYFQDTDYQEGLRSLSQEGVAVKIMDYKDFKYCWENFVYNDDEPFKPWKGLKYNFRF
LKRRLQEILE
(italic: nucleic acid editing domain)
Human APOBEC-3A:
(SEQ ID NO: 279)
MEASPASGPRHLMDPHIFTSNFNNGIGRHKTYLCYEVERLDNGTSVKMDQHRGFLHNQAK
NLLCGFYGRHAELRFLDLVPSLQLDPAQIYRVTWFISWSPCFSWGCAGEVRAFLQENTHV
RLRIFAARIYDYDPLYKEALQMLRDAGAQVSIMTYDEFKHCWDTFVDHQGCPFQPWDGLD
EHSQALSGRLRAILQNQGN
(italic: nucleic acid editing domain)
Rhesus macaque APOBEC-3A:
(SEQ ID NO: 5727)
MDGSPASRPRHLMDPNTFTFNFNNDLSVRGRHQTYLCYEVERLDNGTWVPMDERRGFLCN
KAKNVPCGDYGCHVELRFLCEVPSWQLDPAQTYRVTWFISWSPCFRRGCAGQVRVFLQEN
KHVRLRIFAARIYDYDPLYQEALRTLRDAGAQVSIMTYEEFKHCWDTFVDRQGRPFQPWD
GLDEHSQALSGRLRAILQNQGN
(italic: nucleic acid editing domain)
Bovine APOBEC-3A:
(SEQ ID NO: 5728)
MDEYTFTENFNNQGWPSKTYLCYEMERLDGDATIPLDEYKGFVRNKGLDQPEKPCHAELY
FLGKIHSWNLDRNQHYRLTCFISWSPCYDCAQKLTTFLKENHHISLHILASRIYTHNRFG
CHQSGLCELQAAGARITIMTFEDFKHCWETFVDHKGKPFQPWEGLNVKSQALCTELQAIL
KTQQN
(italic: nucleic acid editing domain)
Human APOBEC-3H:
(SEQ ID NO: 280)
MALLTAETFRLQFNNKRRLRRPYYPRKALLCYQLTPQNGSTPTRGYFENKKKCHAEICFI
NEIKSMGLDETQCYQVTCYLTWSPCSSCAWELVDFIKAHDHLNLGIFASRLYYHWCKPQQ
KGLRLLCGSQVPVEVMGFPKFADCWENFVDHEKPLSFNPYKMLEELDKNSRAIKRRLERI
KIPGVRAQGRYMDILCDAEV
(italic: nucleic acid editing domain)
Rhesus macaque APOBEC-3H:
(SEQ ID NO: 5732)
MALLTAKTFSLQFNNKRRVNKPYYPRKALLCYQLTPQNGSTPTRGHLKNKKKDHAEIRFI
NKIKSMGLDETQCYQVTCYLTWSPCPSCAGELVDFIKAHRHLNLRIFASRLYYHWRPNYQ
EGLLLLCGSQVPVEVMGLPEFTDCWENFVDHKEPPSFNPSEKLEELDKNSQAIKRRLERI
KSRSVDVLENGLRSLQLGPVTPSSSIRNSR
Human APOBEC-3D:
(SEQ ID NO: 281)
MNPQIRNPMERMYRDTFYDNFENEPILYGRSYTWLCYEVKIKRGRSNLLWDTGVFRGPVL
PKRQSNHRQEVYFRFENHAEMCFLSWFCGNRLPANRRFQITWFVSWNPCLPCVVKVTKFL
AEHPNVTLTISAARLYYYRDRDWRWVLLRLHKAGARVKIMDYEDFAYCWENFVCNEGQPF
MPWYKFDDNYASLHRTLKEILRNPMEAMYPHIFYFHFKNLLKACGRNESWLCFTMEVTKH
HSAVFRKRGVFRNQVDPETHCHAERCFLSWFCDDILSPNTNYEVTWYTSWSPCPECAGEV
AEFLARHSNVNLTIFTARLCYFWDTDYQEGLCSLSQEGASVKIMGYKDFVSCWKNFVYSD
DEPFKPWKGLQTNFRLLKRRLREILQ
(italic: nucleic acid editing domain)
Human APOBEC-1:
(SEQ ID NO: 282)
MTSEKGPSTGDPTLRRRIEPWEFDVFYDPRELRKEACLLYEIKWGMSRKIWRSSGKNTTN
HVEVNFIKKFTSERDFHPSMSCSITWFLSWSPCWECSQAIREFLSRHPGVTLVIYVARLF
WHMDQQNRQGLRDLVNSGVTIQIMRASEYYHCWRNFVNYPPGDEAHWPQYPPLWMMLYAL
ELHCIILSLPPCLKISRRWQNHLTFFRLHLQNCHYQTIPPHILLATGLIHPSVAWR
Mouse APOBEC-1:
(SEQ ID NO: 283)
MSSETGPVAVDPTLRRRIEPHEFEVFFDPRELRKETCLLYEINWGGRHSVWRHTSQNTSN
HVEVNFLEKFTTERYFRPNTRCSITWFLSWSPCGECSRAITEFLSRHPYVTLFIYIARLY
HHTDQRNRQGLRDLISSGVTIQIMTEQEYCYCWRNFVNYPPSNEAYWPRYPHLWVKLYVL
ELYCIILGLPPCLKILRRKQPQLTFFTITLQTCHYQRIPPHLLWATGLK
Rat APOBEC-1:
(SEQ ID NO: 284)
[sequence omitted]
Human APOBEC-2:
(SEQ ID NO: 5733)
MAQKEEAAVATEAASQNGEDLENLDDPEKLKELIELPPFEIVTGERLPANFFKFQFRNVE
YSSGRNKTFLCYVVEAQGKGGQVQASRGYLEDEHAAAHAEEAFFNTILPAFDPALRYNVT
WYVSSSPCAACADRIIKTLSKTKNLRLLILVGRLFMWEEPEIQAALKKLKEAGCKLRIMK
PQDFEYVWQNFVEQEEGESKAFQPWEDIQENFLYYEEKLADILK
Mouse APOBEC-2:
(SEQ ID NO: 5734)
MAQKEEAAEAAAPASQNGDDLENLEDPEKLKELIDLPPFEIVTGVRLPVNFFKFQFRNVE
YSSGRNKTFLCYVVEVQSKGGQAQATQGYLEDEHAGAHAEEAFFNTILPAFDPALKYNVT
WYVSSSPCAACADRILKTLSKTKNLRLLILVSRLFMWEEPEVQAALKKLKEAGCKLRIMK
PQDFEYIWQNFVEQEEGESKAFEPWEDIQENFLYYEEKLADILK
Rat APOBEC-2:
(SEQ ID NO: 5735)
MAQKEEAAEAAAPASQNGDDLENLEDPEKLKELIDLPPFEIVTGVRLPVNFFKFQFRNVE
YSSGRNKTFLCYVVEAQSKGGQVQATQGYLEDEHAGAHAEEAFFNTILPAFDPALKYNVT
WYVSSSPCAACADRILKTLSKTKNLRLLILVSRLFMWEEPEVQAALKKLKEAGCKLRIMK
PQDFEYLWQNFVEQEEGESKAFEPWEDIQENFLYYEEKLADILK
Bovine APOBEC-2:
(SEQ ID NO: 5736)
MAQKEEAAAAAEPASQNGEEVENLEDPEKLKELIELPPFEIVTGERLPAHYFKFQFRNVE
YSSGRNKTFLCYVVEAQSKGGQVQASRGYLEDEHATNHAEEAFFNSIMPTFDPALRYMVT
WYVSSSPCAACADRIVKTLNKTKNLRLLILVGRLFMWEEPEIQAALRKLKEAGCRLRIMK
PQDFEYIWQNFVEQEEGESKAFEPWEDIQENFLYYEEKLADILK
Petromyzon marinus CDA1 (pmCDA1)
(SEQ ID NO: 5738)
MTDAEYVRIHEKLDIYTFKKQFFNNKKSVSHRCYVLFELKRRGERRACFWGYAVNKPQSG
TERGIHAEIFSIRKVEEYLRDNPGQFTINWYSSWSPCADCAEKILEWYNQELRGNGHTLK
IWACKLYYEKNARNQIGLWNLRDNGVGLNVMVSEHYQCCRKIFIQSSHNQLNENRWLEKT
LKRAEKRRSELSIMIQVKILHTTKSPAV
Human APOBEC3G D316R_D317R
(SEQ ID NO: 5739)
MKPHFRNTVERMYRDTFSYNFYNRPILSRRNTVWLCYEVKTKGPSRPPLDAKIFRGQVYS
ELKYHPEMRFFHWFSKWRKLHRDQEYEVTWYISWSPCTKCTRDMATFLAEDPKVTLTIFV
ARLYYFWDPDYQEALRSLCQKRDGPRATMKIMNYDEFQHCWSKFVYSQRELFEPWNNLPK
YYILLHIMLGEILRHSMDPPTFTFNFNNEPWVRGRHETYLCYEVERMHNDTWVLLNQRRG
FLCNQAPHKHGFLEGRHAELCFLDVIPFWKLDLDQDYRVTCFTSWSPCFSCAQEMAKFIS
KNKHVSLCIFTARIYRRQGRCQEGLRTLAEAGAKISIMTYSEFKHCWDTFVDHQGCPFQP
WDGLDEHSQDLSGRLRAILQNQEN
Human APOBEC3G chain A
(SEQ ID NO: 5740)
MDPPTFTFNFNNEPWVRGRHETYLCYEVERMHNDTWVLLNQRRGFLCNQAPHKHGFLEGR
HAELCFLDVIPFWKLDLDQDYRVTCFTSWSPCFSCAQEMAKFISKNKHVSLCIFTARIYD
DQGRCQEGLRTLAEAGAKISIMTYSEFKHCWDTFVDHQGCPFQPWDGLDEHSQDLSGRLR
AILQ
Human APOBEC3G chain A D120R_D121R
(SEQ ID NO: 5741)
MDPPTFTFNFNNEPWVRGRHETYLCYEVERMHNDTWVLLNQRRGFLCNQAPHKHGFLEGR
HAELCFLDVIPFWKLDLDQDYRVTCFTSWSPCFSCAQEMAKFISKNKHVSLCIFTARIYR
RQGRCQEGLRTLAEAGAKISIMTYSEFKHCWDTFVDHQGCPFQPWDGLDEHSQDLSGRLR
AILQ

[0216] In some embodiments, fusion proteins as provided herein comprise the full-length amino acid of a nucleic acid editing enzyme, e.g., one of the sequences provided above. In other embodiments, however, fusion proteins as provided herein do not comprise a full-length sequence of a nucleic acid editing enzyme, but only a fragment thereof. For example, in some embodiments, a fusion protein provided herein comprises a Cas9 domain and a fragment of a nucleic acid editing enzyme, e.g., wherein the fragment comprises a nucleic acid editing domain. Exemplary amino acid sequences of nucleic acid editing domains are shown in the sequences above as italicized letters, and additional suitable sequences of such domains will be apparent to those of skill in the art.

[0217] Additional suitable nucleic-acid editing enzyme sequences, e.g., deaminase enzyme and domain sequences, that can be used according to aspects of this invention, e.g., that can be fused to a nuclease-inactive Cas9 domain, will be apparent to those of skill in the art based on this disclosure. In some embodiments, such additional enzyme sequences include deaminase enzyme or deaminase domain sequences that are at least 70%, at least 75%, at least 80%, at least 85%, at least 90%, at least 95%, at least 96%, at least 97%, at least 98%, or at least 99% similar to the sequences provided herein. Additional suitable Cas9 domains, variants, and sequences will also be apparent to those of skill in the art. Examples of such additional suitable Cas9 domains include, but are not limited to, D10A, D10A/D839A/H840A, and D10A/D839A/H840A/N863A mutant domains (See, e.g., Prashant et al., CAS9 transcriptional activators for target specificity screening and paired nickases for cooperative genome engineering. Nature Biotechnology. 2013; 31(9): 833-838 the entire contents of which are incorporated herein by reference). In some embodiments, the Cas9 comprises a histidine residue at position 840 of the amino acid sequence provided in SEQ ID NO: 10, or a corresponding mutation in any of the amino acid sequences provided in SEQ ID NOs: 11-260. The presence of the catalytic residue H840 restores the activity of the Cas9 to cleave the non-edited strand containing a G opposite the targeted C. Restoration of H840 does not result in the cleavage of the target strand containing the C.

[0218] Additional suitable strategies for generating fusion proteins comprising a Cas9 domain and a deaminase domain will be apparent to those of skill in the art based on this disclosure in combination with the general knowledge in the art. Suitable strategies for generating fusion proteins according to aspects of this disclosure using linkers or without the use of linkers will also be apparent to those of skill in the art in view of the instant disclosure and the knowledge in the art. For example, Gilbert et al., CRISPR-mediated modular RNA-guided regulation of transcription in eukaryotes. Cell. 2013; 154(2):442-51, showed that C-terminal fusions of Cas9 with VP64 using 2 NLS's as a linker (SPKKKRKVEAS, SEQ ID NO: 599), can be employed for transcriptional activation. Mali et al., CAS9 transcriptional activators for target specificity screening and paired nickases for cooperative genome engineering. Nat Biotechnol. 2013; 31(9):833-8, reported that C-terminal fusions with VP64 without linker can be employed for transcriptional activation. And Maeder et al., CRISPR RNA-guided activation of endogenous human genes. Nat Methods. 2013; 10: 977-979, reported that C-terminal fusions with VP64 using a Gly4Ser (SEQ ID NO: 5) linker can be used as transcriptional activators. Recently, dCas9-FokI nuclease fusions have successfully been generated and exhibit improved enzymatic specificity as compared to the parental Cas9 enzyme (In Guilinger J P, Thompson D B, Liu D R. Fusion of catalytically inactive Cas9 to FokI nuclease improves the specificity of genome modification. Nat. Biotechnol. 2014; 32(6): 577-82, and in Tsai S Q, Wyvekens N, Khayter C, Foden J A, Thapar V, Reyon D, Goodwin M J, Aryee M J, Joung J K. Dimeric CRISPR RNA-guided FokI nucleases for highly specific genome editing. Nat Biotechnol. 2014; 32(6):569-76. PMID: 24770325 a SGSETPGTSESATPES (SEQ ID NO: 7) or a GGGGS (SEQ ID NO: 5) linker was used in FokI-dCas9 fusion proteins, respectively).

[0219] Some aspects of this disclosure provide fusion proteins comprising (i) a Cas9 enzyme or domain (e.g., a first protein); and (ii) a nucleic acid-editing enzyme or domain (e.g., a second protein). In some aspects, the fusion proteins provided herein further include (iii) a programmable DNA-binding protein, for example, a zinc-finger domain, a TALE, or a second Cas9 protein (e.g., a third protein). Without wishing to be bound by any particular theory, fusing a programmable DNA-binding protein (e.g., a second Cas9 protein) to a fusion protein comprising (i) a Cas9 enzyme or domain (e.g., a first protein); and (ii) a nucleic acid-editing enzyme or domain (e.g., a second protein) may be useful for improving specificity of the fusion protein to a target nucleic acid sequence, or for improving specificity or binding affinity of the fusion protein to bind target nucleic acid sequence that does not contain a canonical PAM (NGG) sequence. In some embodiments, the third protein is a Cas9 protein (e.g, a second Cas9 protein). In some embodiments, the third protein is any of the Cas9 proteins provided herein. In some embodiments, the third protein is fused to the fusion protein N-terminal to the Cas9 protein (e.g., the first protein). In some embodiments, the third protein is fused to the fusion protein C-terminal to the Cas9 protein (e.g., the first protein). In some embodiments, the Cas9 domain (e.g., the first protein) and the third protein (e.g., a second Cas9 protein) are fused via a linker (e.g., a second linker). In some embodiments, the linker comprises a (GGGGS)ₙ (SEQ ID NO: 5), a (G)ₙ, an (EAAAK)ₙ (SEQ ID NO: 6), a (GGS)ₙ, (SGGS)ₙ (SEQ ID NO: 4288), an SGSETPGTSESATPES (SEQ ID NO: 7), or an (XP)ₙ motif, or a combination of any of these, wherein n is independently an integer between 1 and 30. In some embodiments, the general architecture of exemplary Cas9 fusion proteins provided herein comprises the structure:
[0220] [NH2]-[nucleic acid-editing enzyme or domain]-[Cas9]-[third protein]-[COOH];
[0221] [NH2]-[third protein]-[Cas9]-[nucleic acid-editing enzyme or domain]-[COOH];
[0222] [NH2]-[Cas9]-[nucleic acid-editing enzyme or domain]-[third protein]-[COOH];
[0223] [NH2]-[third protein]-[nucleic acid-editing enzyme or domain]-[Cas9]-[COOH];
[0224] [NH2]-[UGI]-[nucleic acid-editing enzyme or domain]-[Cas9]-[third protein]-[COOH];
[0225] [NH2]-[UGI]-[third protein]-[Cas9]-[nucleic acid-editing enzyme or domain]-[COOH];
[0226] [NH2]-[UGI]-[Cas9]-[nucleic acid-editing enzyme or domain]-[third protein]-[COOH];
[0227] [NH2]-[UGI]-[third protein]-[nucleic acid-editing enzyme or domain]-[Cas9]-[COOH];
[0228] [NH2]-[nucleic acid-editing enzyme or domain]-[Cas9]-[third protein]-[UGI]-[COOH];
[0229] [NH2]-[third protein]-[Cas9]-[nucleic acid-editing enzyme or domain]-[UGI]-[COOH];
[0230] [NH2]-[Cas9]-[nucleic acid-editing enzyme or domain]-[third protein]-[UGI]-[COOH]; or
[0231] [NH2]-[third protein]-[nucleic acid-editing enzyme or domain]-[Cas9]-[UGI]-[COOH];
   wherein NH2 is the N-terminus of the fusion protein, and COOH is the C-terminus of the fusion protein. In some embodiments, the “]-[” used in the general architecture above indicates the presence of an optional linker sequence. In other examples, the general architecture of exemplary Cas9 fusion proteins provided herein comprises the structure:
[0232] [NH2]-[nucleic acid-editing enzyme or domain]-[Cas9]-[second Cas9 protein]-[COOH];
[0233] [NH2]-[second Cas9 protein]-[Cas9]-[nucleic acid-editing enzyme or domain]-[COOH];
[0234] [NH2]-[Cas9]-[nucleic acid-editing enzyme or domain]-[second Cas9 protein]-[COOH];
[0235] [NH2]-[second Cas9 protein]-[nucleic acid-editing enzyme or domain]-[Cas9]-[COOH];
[0236] [NH2]-[UGI]-[nucleic acid-editing enzyme or domain]-[Cas9]-[second Cas9 protein]-[COOH],
[0237] [NH2]-[UGI]-[second Cas9 protein]-[Cas9]-[nucleic acid-editing enzyme or domain]-[COOH];
[0238] [NH2]-[UGI]-[Cas9]-[nucleic acid-editing enzyme or domain]-[second Cas9 protein]-[COOH];
[0239] [NH2]-[UGI]-[second Cas9 protein]-[nucleic acid-editing enzyme or domain]-[Cas9]-[COOH];
[0240] [NH2]-[nucleic acid-editing enzyme or domain]-[Cas9]-[second Cas9 protein]-[UGI]-[COOH];
[0241] [NH2]-[second Cas9 protein]-[Cas9]-[nucleic acid-editing enzyme or domain]-[UGI]-[COOH];
[0242] [NH2]-[Cas9]-[nucleic acid-editing enzyme or domain]-[second Cas9 protein]-[UGI]-[COOH]; or
[0243] [NH2]-[second Cas9 protein]-[nucleic acid-editing enzyme or domain]-[Cas9]-[UGI]-[COOH];
   wherein NH₂ is the N-terminus of the fusion protein, and COOH is the C-terminus of the fusion protein. In some embodiments, the “]-[” used in the general architecture above indicates the presence of an optional linker sequence. In some embodiments, the second Cas9 is a dCas9 protein. In some examples, the general architecture of exemplary Cas9 fusion proteins provided herein comprises a structure as shown in FIG. 3. It should be appreciated that any of the proteins provided in any of the general architectures of exemplary Cas9 fusion proteins may be connected by one or more of the linkers provided herein. In some embodiments, the linkers are the same. In some embodiments, the linkers are different. In some embodiments, one or more of the proteins provided in any of the general architectures of exemplary Cas9 fusion proteins are not fused via a linker. In some embodiments, the fusion proteins further comprise a nuclear targeting sequence, for example a nuclear localization sequence. In some embodiments, fusion proteins provided herein further comprise a nuclear localization sequence (NLS). In some embodiments, the NLS is fused to the N-terminus of the fusion protein. In some embodiments, the NLS is fused to the C-terminus of the fusion protein. In some embodiments, the NLS is fused to the N-terminus of the third protein. In some embodiments, the NLS is fused to the C-terminus of the third protein. In some embodiments, the NLS is fused to the N-terminus of the Cas9 protein. In some embodiments, the NLS is fused to the C-terminus of the Cas9 protein. In some embodiments, the NLS is fused to the N-terminus of the nucleic acid-editing enzyme or domain. In some embodiments, the NLS is fused to the C-terminus of the nucleic acid-editing enzyme or domain. In some embodiments, the NLS is fused to the N-terminus of the UGI protein. In some embodiments, the NLS is fused to the C-terminus of the UGI protein. In some embodiments, the NLS is fused to the fusion protein via one or more linkers. In some embodiments, the NLS is fused to the fusion protein without a linker

### Uracil Glycosylase Inhibitor Fusion Proteins

[0244] Some aspects of the disclosure relate to fusion proteins that comprise a uracil glycosylase inhibitor (UGI) domain. In some embodiments, any of the fusion proteins provided herein that comprise a Cas9 domain (e.g., a nuclease active Cas9 domain, a nuclease inactive dCas9 domain, or a Cas9 nickase) may be further fused to a UGI domain either directly or via a linker. Some aspects of this disclosure provide deaminase-dCas9 fusion proteins, deaminase-nuclease active Cas9 fusion proteins and deaminase-Cas9 nickase fusion proteins with increased nucleobase editing efficiency. Without wishing to be bound by any particular theory, cellular DNA-repair response to the presence of U:G heteroduplex DNA may be responsible for the decrease in nucleobase editing efficiency in cells. For example, uracil DNA glycosylase (UDG) catalyzes removal of U from DNA in cells, which may initiate base excision repair, with reversion of the U:G pair to a C:G pair as the most common outcome. As demonstrated in the Examples below, Uracil DNA Glycosylase Inhibitor (UGI) may inhibit human UDG activity. Thus, this disclosure contemplates a fusion protein comprising dCas9-nucleic acid editing domain further fused to a UGI domain. This disclosure also contemplates a fusion protein comprising a Cas9 nickase-nucleic acid editing domain further fused to a UGI domain. It should be understood that the use of a UGI domain may increase the editing efficiency of a nucleic acid editing domain that is capable of catalyzing a C to U change. For example, fusion proteins comprising a UGI domain may be more efficient in deaminating C residues. In some embodiments, the fusion protein comprises the structure:
[0245] [deaminase]-[optional linker sequence]-[dCas9]-[optional linker sequence]-[UGI];
[0246] [deaminase]-[optional linker sequence]-[UGI]-[optional linker sequence]-[dCas9];
[0247] [UGI]-[optional linker sequence]-[deaminase]-[optional linker sequence]-[dCas9];
[0248] [UGI]-[optional linker sequence]-[dCas9]-[optional linker sequence]-[deaminase];
[0249] [dCas9]-[optional linker sequence]-[deaminase]-[optional linker sequence]-[UGI]; or
[0250] [dCas9]-[optional linker sequence]-[UGI]-[optional linker sequence]-[deaminase].
   In other embodiments, the fusion protein comprises the structure:
[0251] [deaminase]-[optional linker sequence]-[Cas9 nickase]-[optional linker sequence]-[UGI];
[0252] [deaminase]-[optional linker sequence]-[UGI]-[optional linker sequence]-[Cas9 nickase];
[0253] [UGI]-[optional linker sequence]-[deaminase]-[optional linker sequence]-[Cas9 nickase];
[0254] [UGI]-[optional linker sequence]-[Cas9 nickase]-[optional linker sequence]-[deaminase];
[0255] [Cas9 nickase]-[optional linker sequence]-[deaminase]-[optional linker sequence]-[UGI]; or
[0256] [Cas9 nickase]-[optional linker sequence]-[UGI]-[optional linker sequence]-[deaminase].

[0257] In some embodiments, the fusion proteins provided herein do not comprise a linker sequence. In some embodiments, one or both of the optional linker sequences are present.

[0258] In some embodiments, the “-” used in the general architecture above indicates the presence of an optional linker sequence. In some embodiments, the fusion proteins comprising a UGI further comprise a nuclear targeting sequence, for example a nuclear localization sequence. In some embodiments, fusion proteins provided herein further comprise a nuclear localization sequence (NLS). In some embodiments, the NLS is fused to the N-terminus of the fusion protein. In some embodiments, the NLS is fused to the C-terminus of the fusion protein. In some embodiments, the NLS is fused to the N-terminus of the UGI protein. In some embodiments, the NLS is fused to the C-terminus of the UGI protein. In some embodiments, the NLS is fused to the N-terminus of the Cas9 protein. In some embodiments, the NLS is fused to the C-terminus of the Cas9 protein. In some embodiments, the NLS is fused to the N-terminus of the deaminase. In some embodiments, the NLS is fused to the C-terminus of the deaminase. In some embodiments, the NLS is fused to the N-terminus of the second Cas9. In some embodiments, the NLS is fused to the C-terminus of the second Cas9. In some embodiments, the NLS is fused to the fusion protein via one or more linkers. In some embodiments, the NLS is fused to the fusion protein without a linker. In some embodiments, the NLS comprises an amino acid sequence of any one of the NLS sequences provided or referenced herein. In some embodiments, the NLS comprises an amino acid sequence as set forth in SEQ ID NO: 741 or SEQ ID NO: 742.

[0259] In some embodiments, a UGI domain comprises a wild-type UGI or a UGI as set forth in SEQ ID NO: 600. In some embodiments, the UGI proteins provided herein include fragments of UGI and proteins homologous to a UGI or a UGI fragment. For example, in some embodiments, a UGI domain comprises a fragment of the amino acid sequence set forth in SEQ ID NO: 600. In some embodiments, a UGI fragment comprises an amino acid sequence that comprises at least 60%, at least 65%, at least 70%, at least 75%, at least 80%, at least 85%, at least 90%, at least 95%, at least 96%, at least 97%, at least 98%, at least 99%, or at least 99.5% of the amino acid sequence as set forth in SEQ ID NO: 600. In some embodiments, a UGI comprises an amino acid sequence homologous to the amino acid sequence set forth in SEQ ID NO: 600 or an amino acid sequence homologous to a fragment of the amino acid sequence set forth in SEQ ID NO: 600. In some embodiments, proteins comprising UGI or fragments of UGI or homologs of UGI or UGI fragments are referred to as “UGI variants.” A UGI variant shares homology to UGI, or a fragment thereof. For example a UGI variant is at least 70% identical, at least 75% identical, at least 80% identical, at least 85% identical, at least 90% identical, at least 95% identical, at least 96% identical, at least 97% identical, at least 98% identical, at least 99% identical, at least 99.5% identical, or at least 99.9% identical to a wild type UGI or a UGI as set forth in SEQ ID NO: 600. In some embodiments, the UGI variant comprises a fragment of UGI, such that the fragment is at least 70% identical, at least 80% identical, at least 90% identical, at least 95% identical, at least 96% identical, at least 97% identical, at least 98% identical, at least 99% identical, at least 99.5% identical, or at least 99.9% to the corresponding fragment of wild-type UGI or a UGI as set forth in SEQ ID NO: 600. In some embodiments, the UGI comprises the following amino acid sequence:

>sp P14739|UNGI_BPPB2 Uracil-DNA glycosylase
inhibitor
(SEQ ID NO: 600)
MTNLSDIIEKETGKQLVIQESILMLPEEVEEVIGNKPESDIL
VHTAYDESTDENVMLLTSDAPEYKPWALVIQDSNGENKIKML

[0260] Suitable UGI protein and nucleotide sequences are provided herein and additional suitable UGI sequences are known to those in the art, and include, for example, those published in Wang et al., Uracil-DNA glycosylase inhibitor gene of bacteriophage PBS2 encodes a binding protein specific for uracil-DNA glycosylase. J. Biol. Chem. 264:1163-1171(1989); Lundquist et al., Site-directed mutagenesis and characterization of uracil-DNA glycosylase inhibitor protein. Role of specific carboxylic amino acids in complex formation with Escherichia coli uracil-DNA glycosylase. J. Biol. Chem. 272:21408-21419(1997); Ravishankar et al., X-ray analysis of a complex of Escherichia coli uracil DNA glycosylase (EcUDG) with a proteinaceous inhibitor. The structure elucidation of a prokaryotic UDG. Nucleic Acids Res. 26:4880-4887(1998); and Putnam et al., Protein mimicry of DNA from crystal structures of the uracil-DNA glycosylase inhibitor protein and its complex with Escherichia coli uracil-DNA glycosylase. J. Mol. Biol. 287:331-346(1999), the entire contents of each are incorporated herein by reference.

[0261] It should be appreciated that additional proteins may be uracil glycosylase inhibitors. For example, other proteins that are capable of inhibiting (e.g., sterically blocking) a uracil-DNA glycosylase base-excision repair enzyme are within the scope of this disclosure. Additionally, any proteins that block or inhibit base-excision repair as also within the scope of this disclosure. In some embodiments, a protein that binds DNA is used. In another embodiment, a substitute for UGI is used. In some embodiments, a uracil glycosylase inhibitor is a protein that binds single-stranded DNA. For example, a uracil glycosylase inhibitor may be a Erwinia tasmaniensis single-stranded binding protein. In some embodiments, the single-stranded binding protein comprises the amino acid sequence (SEQ ID NO: 322). In some embodiments, a uracil glycosylase inhibitor is a protein that binds uracil. In some embodiments, a uracil glycosylase inhibitor is a protein that binds uracil in DNA. In some embodiments, a uracil glycosylase inhibitor is a catalytically inactive uracil DNA-glycosylase protein. In some embodiments, a uracil glycosylase inhibitor is a catalytically inactive uracil DNA-glycosylase protein that does not excise uracil from the DNA. For example, a uracil glycosylase inhibitor is a UdgX. In some embodiments, the UdgX comprises the amino acid sequence (SEQ ID NO: 323). As another example, a uracil glycosylase inhibitor is a catalytically inactive UDG. In some embodiments, a catalytically inactive UDG comprises the amino acid sequence (SEQ ID NO: 324). It should be appreciated that other uracil glycosylase inhibitors would be apparent to the skilled artisan and are within the scope of this disclosure. In some embodiments, a uracil glycosylase inhibitor is a protein that is homologous to any one of SEQ ID NOs: 322-324. In some embodiments, a uracil glycosylase inhibitor is a protein that is at least 50% identical, at least 55% identical at least 60% identical, at least 65% identical, at least 70% identical, at least 75% identical, at least 80% identical at least 85% identical, at least 90% identical, at least 95% identical, at least 96% identical, at least 98% identical, at least 99% identical, or at least 99.5% identical to any one of SEQ ID NOs: 322-324.

Erwinia tasmaniensis SSB (themostable single-
stranded DNA binding protein)
(SEQ ID NO: 322)
MASRGVNKVILVGNLGQDPEVRYMPNGGAVANITLATSESWRDKQ
TGETKEKTEWHRVVLFGKLAEVAGEYLRKGSQVYIEGALQTRKWT
DQAGVEKYTTEVVVNVGGTMQMLGGRSQGGGASAGGONGGSNNGW
GQPQQPQGGNQFSGGAQQQARPQQQPQQNNAPANNEPPIDFDDDI
P
UdgX (binds to Uracil in DNA but does not
excise)
(SEQ ID NO: 323)
MAGAQDFVPHTADLAELAAAAGECRGCGLYRDATQAVFGAGGRSA
RIMMIGEQPGDKEDLAGLPFVGPAGRLLDRALEAADIDRDALYVT
NAVKHFKFTRAAGGKRRIHKTPSRTEVVACRPWLIAEMTSVEPDV
VVLLGATAAKALLGNDFRVTQHRGEVLHVDDVPGDPALVATVHPS
SLLRGPKEERESAFAGLVDDLRVAADVRP
UDG (catalytically inactive human UDG, binds
to Uracil in DNA but does not excise)
(SEQ ID NO: 324)
MIGQKTLYSFFSPSPARKRHAPSPEPAVQGTGVAGVPEESGDAAA
IPAKKAPAGQEEPGTPPSSPLSAEQLDRIQRNKAAALLRLAARNV
PVGFGESWKKHLSGEFGKPYFIKLMGFVAEERKHYTVYPPPHQVF
TWTQMCDIKDVKVVILGQEPYHGPNQAHGLCFSVQRPVPPPPSLE
NIYKELSTDIEDFVHPGHGDLSGWAKQGVLLLNAVLTVRAHQANS
HKERGWEQFTDAVVSWLNQNSNGLVFLLWGSYAQKKGSAIDRKRH
HVLQTAHPSPLSVYRGFFGCRHFSKTNELLQKSGKKPIDWKEL

[0262] In some embodiments, the nucleic acid editing domain is a deaminase domain. In some embodiments, the deaminase is a cytosine deaminase or a cytidine deaminase. In some embodiments, the deaminase is an apolipoprotein B mRNA-editing complex (APOBEC) family deaminase. In some embodiments, the deaminase is an APOBEC1 deaminase. In some embodiments, the deaminase is an APOBEC2 deaminase. In some embodiments, the deaminase is an APOBEC3 deaminase. In some embodiments, the deaminase is an APOBEC3A deaminase. In some embodiments, the deaminase is an APOBEC3B deaminase. In some embodiments, the deaminase is an APOBEC3C deaminase. In some embodiments, the deaminase is an APOBEC3D deaminase. In some embodiments, the deaminase is an APOBEC3E deaminase. In some embodiments, the deaminase is an APOBEC3F deaminase. In some embodiments, the deaminase is an APOBEC3G deaminase. In some embodiments, the deaminase is an APOBEC3H deaminase. In some embodiments, the deaminase is an APOBEC4 deaminase. In some embodiments, the deaminase is an activation-induced deaminase (AID). In some embodiments, the deminase is a rat APOBEC1 (SEQ ID NO: 282). In some embodiments, the deminase is a human APOBEC1 (SEQ ID No: 284). In some embodiments, the deaminase is a Petromyzon marinus cytidine deaminase 1 (pmCDA1). In some embodiments, the deminase is a human APOBEC3G (SEQ ID NO: 275). In some embodiments, the deaminase is a fragment of the human APOBEC3G (SEQ ID NO: 5740). In some embodiments, the deaminase is a human APOBEC3G variant comprising a D316R_D317R mutation (SEQ ID NO: 5739). In some embodiments, the deaminase is a frantment of the human APOBEC3G and comprising mutations corresponding to the D316R_D317R mutations in SEQ ID NO: 275 (SEQ ID NO: 5741).

[0263] In some embodiments, the linker comprises a (GGGS)ₙ (SEQ ID NO: 265), (GGGGS)ₙ (SEQ ID NO: 5), a (G)ₙ, an (EAAAK)ₙ (SEQ ID NO: 6), a (GGS)ₙ, an SGSETPGTSESATPES (SEQ ID NO: 7), or an (XP)ₙ motif, or a combination of any of these, wherein n is independently an integer between 1 and 30.

[0264] Suitable UGI protein and nucleotide sequences are provided herein and additional suitable UGI sequences are known to those in the art, and include, for example, those published in Wang et al., Uracil-DNA glycosylase inhibitor gene of bacteriophage PBS2 encodes a binding protein specific for uracil-DNA glycosylase. J. Biol. Chem. 264:1163-1171(1989); Lundquist et al., Site-directed mutagenesis and characterization of uracil-DNA glycosylase inhibitor protein. Role of specific carboxylic amino acids in complex formation with Escherichia coli uracil-DNA glycosylase. J. Biol. Chem. 272:21408-21419(1997); Ravishankar et al., X-ray analysis of a complex of Escherichia coli uracil DNA glycosylase (EcUDG) with a proteinaceous inhibitor. The structure elucidation of a prokaryotic UDG. Nucleic Acids Res. 26:4880-4887(1998); and Putnam et al., Protein mimicry of DNA from crystal structures of the uracil-DNA glycosylase inhibitor protein and its complex with Escherichia coli uracil-DNA glycosylase. J. Mol. Biol. 287:331-346(1999), the entire contents of which are incorporated herein by reference. In some embodiments, the optional linker comprises a (GGS)ₙ motif, wherein n is 1, 2, 3, 4, 5, 6, 7, 8, 9, 19, 11, 12, 13, 14, 15, 16, 17, 18, 19, or 20. In some embodiments, the optional linker comprises a (GGS)n motif, wherein n is 1, 3, or 7. In some embodiments, the optional linker comprises the amino acid sequence SGSETPGTSESATPES (SEQ ID NO: 7), which is also referred to as the XTEN linker in the Examples.

[0265] In some embodiments, a Cas9 nickase may further facilitate the removal of a base on the non-edited strand in an organism whose genome is edited in vivo. The Cas9 nickase, as described herein, may comprise a D10A mutation in SEQ ID NO: 10, or a corresponding mutation in any of SEQ ID NOs: 11-260. In some embodiments, the Cas9 nickase of this disclosure may comprise a histidine at mutation 840 of SEQ ID NO: 10, or a corresponding residue in any of SEQ ID NOs: 11-260. Such fusion proteins comprising the Cas9 nickase, can cleave a single strand of the target DNA sequence, e.g., the strand that is not being edited. Without wishing to be bound by any particular theory, this cleavage may inhibit mis-match repair mechanisms that reverse a C to U edit made by the deaminase.

Cas9 Complexes with Guide RNAs

[0266] Some aspects of this disclosure provide complexes comprising any of the fusion proteins provided herein, and a guide RNA bound to a Cas9 domain (e.g., a dCas9, a nuclease active Cas9, or a Cas9 nickase) of fusion protein.

[0267] In some embodiments, the guide RNA is from 15-100 nucleotides long and comprises a sequence of at least 10 contiguous nucleotides that is complementary to a target sequence. In some embodiments, the guide RNA is 15, 16, 17, 18, 19, 20, 21, 22, 23, 24, 25, 26, 27, 28, 29, 30, 31, 32, 33, 34, 35, 36, 37, 38, 39, 40, 41, 42, 43, 44, 45, 46, 47, 48, 49, or 50 nucleotides long. In some embodiments, the guide RNA comprises a sequence of 15, 16, 17, 18, 19, 20, 21, 22, 23, 24, 25, 26, 27, 28, 29, 30, 31, 32, 33, 34, 35, 36, 37, 38, 39, or 40 contiguous nucleotides that is complementary to a target sequence. In some embodiments, the target sequence is a DNA sequence. In some embodiments, the target sequence is a sequence in the genome of a mammal. In some embodiments, the target sequence is a sequence in the genome of a human. In some embodiments, the 3′ end of the target sequence is immediately adjacent to a canonical PAM sequence (NGG). In some embodiments, the guide RNA is complementary to a sequence associated with a disease or disorder. In some embodiments, the guide RNA is complementary to a sequence associated with a disease or disorder having a mutation in a gene selected from the genes disclosed in any one of Tables 1-3. In some embodiments, the guide RNA comprises a nucleotide sequence of any one of the guide sequences provided in Table 2 or Table 3. Exemplary sequences in the human genome that may be targeted by the complexes of this disclosure are provided herein in Tables 1-3.

### Methods of Using Cas9 Fusion Proteins

[0268] Some aspects of this disclosure provide methods of using the Cas9 proteins, fusion proteins, or complexes provided herein. For example, some aspects of this disclosure provide methods comprising contacting a DNA molecule (a) with any of the Cas9 proteins or fusion proteins provided herein, and with at least one guide RNA, wherein the guide RNA is about 15-100 nucleotides long and comprises a sequence of at least 10 contiguous nucleotides that is complementary to a target sequence; or (b) with a Cas9 protein, a Cas9 fusion protein, or a Cas9 protein or fusion protein complex with at least one gRNA as provided herein. In some embodiments, the 3′ end of the target sequence is not immediately adjacent to a canonical PAM sequence (NGG). In some embodiments, the 3′ end of the target sequence is immediately adjacent to an AGC, GAG, TTT, GTG, or CAA sequence.

[0269] In some embodiments, the target DNA sequence comprises a sequence associated with a disease or disorder. In some embodiments, the target DNA sequence comprises a point mutation associated with a disease or disorder. In some embodiments, the activity of the Cas9 protein, the Cas9 fusion protein, or the complex results in a correction of the point mutation. In some embodiments, the target DNA sequence comprises a T→C point mutation associated with a disease or disorder, and wherein the deamination of the mutant C base results in a sequence that is not associated with a disease or disorder. In some embodiments, the target DNA sequence encodes a protein and wherein the point mutation is in a codon and results in a change in the amino acid encoded by the mutant codon as compared to the wild-type codon. In some embodiments, the deamination of the mutant C results in a change of the amino acid encoded by the mutant codon. In some embodiments, the deamination of the mutant C results in the codon encoding the wild-type amino acid. In some embodiments, the contacting is in vivo in a subject. In some embodiments, the subject has or has been diagnosed with a disease or disorder. In some embodiments, the disease or disorder is cystic fibrosis, phenylketonuria, epidermolytic hyperkeratosis (EHK), Charcot-Marie-Toot disease type 4J, neuroblastoma (NB), von Willebrand disease (vWD), myotonia congenital, hereditary renal amyloidosis, dilated cardiomyopathy (DCM), hereditary lymphedema, familial Alzheimer's disease, HIV, Prion disease, chronic infantile neurologic cutaneous articular syndrome (CINCA), desmin-related myopathy (DRM), a neoplastic disease associated with a mutant PI3KCA protein, a mutant CTNNB1 protein, a mutant HRAS protein, or a mutant p53 protein.

[0270] Some embodiments provide methods for using the Cas9 DNA editing fusion proteins provided herein. In some embodiments, the fusion protein is used to introduce a point mutation into a nucleic acid by deaminating a target nucleobase, e.g., a C residue. In some embodiments, the deamination of the target nucleobase results in the correction of a genetic defect, e.g., in the correction of a point mutation that leads to a loss of function in a gene product. In some embodiments, the genetic defect is associated with a disease or disorder, e.g., a lysosomal storage disorder or a metabolic disease, such as, for example, type I diabetes. In some embodiments, the methods provided herein are used to introduce a deactivating point mutation into a gene or allele that encodes a gene product that is associated with a disease or disorder. For example, in some embodiments, methods are provided herein that employ a Cas9 DNA editing fusion protein to introduce a deactivating point mutation into an oncogene (e.g., in the treatment of a proliferative disease). A deactivating mutation may, in some embodiments, generate a premature stop codon in a coding sequence, which results in the expression of a truncated gene product, e.g., a truncated protein lacking the function of the full-length protein.

[0271] In some embodiments, the purpose of the methods provide herein is to restore the function of a dysfunctional gene via genome editing. The Cas9 deaminase fusion proteins provided herein can be validated for gene editing-based human therapeutics in vitro, e.g., by correcting a disease-associated mutation in human cell culture. It will be understood by the skilled artisan that the fusion proteins provided herein, e.g., the fusion proteins comprising a Cas9 domain and a nucleic acid deaminase domain can be used to correct any single point T→C or A→G mutation. In the first case, deamination of the mutant C back to U corrects the mutation, and in the latter case, deamination of the C that is base-paired with the mutant G, followed by a round of replication, corrects the mutation.

[0272] An exemplary disease-relevant mutation that can be corrected by the provided fusion proteins in vitro or in vivo is the H1047R (A3140G) polymorphism in the PI3KCA protein. The phosphoinositide-3-kinase, catalytic alpha subunit (PI3KCA) protein acts to phosphorylate the 3-OH group of the inositol ring of phosphatidylinositol. The PI3KCA gene has been found to be mutated in many different carcinomas, and thus it is considered to be a potent oncogene.³⁷ In fact, the A3140G mutation is present in several NCI-60 cancer cell lines, such as, for example, the HCT116, SKOV3, and T47D cell lines, which are readily available from the American Type Culture Collection (ATCC).³⁸

[0273] In some embodiments, a cell carrying a mutation to be corrected, e.g., a cell carrying a point mutation, e.g., an A3140G point mutation in exon 20 of the PI3KCA gene, resulting in a H1047R substitution in the PI3KCA protein, is contacted with an expression construct encoding a Cas9 deaminase fusion protein and an appropriately designed sgRNA targeting the fusion protein to the respective mutation site in the encoding PI3KCA gene. Control experiments can be performed where the sgRNAs are designed to target the fusion enzymes to non-C residues that are within the PI3KCA gene. Genomic DNA of the treated cells can be extracted, and the relevant sequence of the PI3KCA genes PCR amplified and sequenced to assess the activities of the fusion proteins in human cell culture.

[0274] It will be understood that the example of correcting point mutations in PI3KCA is provided for illustration purposes and is not meant to limit the instant disclosure. The skilled artisan will understand that the instantly disclosed DNA-editing fusion proteins can be used to correct other point mutations and mutations associated with other cancers and with diseases other than cancer including other proliferative diseases.

[0275] The successful correction of point mutations in disease-associated genes and alleles opens up new strategies for gene correction with applications in therapeutics and basic research. Site-specific single-base modification systems like the disclosed fusions of Cas9 and deaminase enzymes or domains also have applications in “reverse” gene therapy, where certain gene functions are purposely suppressed or abolished. In these cases, site-specifically mutating Trp (TGG), Gln (CAA and CAG), or Arg (CGA) residues to premature stop codons (TAA, TAG, TGA) can be used to abolish protein function in vitro, ex vivo, or in vivo.

[0276] The instant disclosure provides methods for the treatment of a subject diagnosed with a disease associated with or caused by a point mutation that can be corrected by a Cas9 DNA editing fusion protein provided herein. For example, in some embodiments, a method is provided that comprises administering to a subject having such a disease, e.g., a cancer associated with a PI3KCA point mutation as described above, an effective amount of a Cas9 deaminase fusion protein that corrects the point mutation or introduces a deactivating mutation into the disease-associated gene. In some embodiments, the disease is a proliferative disease. In some embodiments, the disease is a genetic disease. In some embodiments, the disease is a neoplastic disease. In some embodiments, the disease is a metabolic disease. In some embodiments, the disease is a lysosomal storage disease. Other diseases that can be treated by correcting a point mutation or introducing a deactivating mutation into a disease-associated gene will be known to those of skill in the art, and the disclosure is not limited in this respect.

[0277] The instant disclosure provides methods for the treatment of additional diseases or disorders, e.g., diseases or disorders that are associated or caused by a point mutation that can be corrected by deaminase-mediated gene editing. Some such diseases are described herein, and additional suitable diseases that can be treated with the strategies and fusion proteins provided herein will be apparent to those of skill in the art based on the instant disclosure. Exemplary suitable diseases and disorders are listed below. It will be understood that the numbering of the specific positions or residues in the respective sequences depends on the particular protein and numbering scheme used. Numbering might be different, e.g., in precursors of a mature protein and the mature protein itself, and differences in sequences from species to species may affect numbering. One of skill in the art will be able to identify the respective residue in any homologous protein and in the respective encoding nucleic acid by methods well known in the art, e.g., by sequence alignment and determination of homologous residues. Exemplary suitable diseases and disorders include, without limitation, cystic fibrosis (see, e.g., Schwank et al., Functional repair of CFTR by CRISPR/Cas9 in intestinal stem cell organoids of cystic fibrosis patients. Cell stem cell. 2013; 13: 653-658; and Wu et. al., Correction of a genetic disease in mouse via use of CRISPR-Cas9. Cell stem cell. 2013; 13: 659-662, neither of which uses a deaminase fusion protein to correct the genetic defect); phenylketonuria—e.g., phenylalanine to serine mutation at position 835 (mouse) or 240 (human) or a homologous residue in phenylalanine hydroxylase gene (T>C mutation)—see, e.g., McDonald et al., Genomics. 1997; 39:402-405; Bernard-Soulier syndrome (BSS)—e.g., phenylalanine to serine mutation at position 55 or a homologous residue, or cysteine to arginine at residue 24 or a homologous residue in the platelet membrane glycoprotein IX (T>C mutation)—see, e.g., Noris et al., British Journal of Haematology. 1997; 97: 312-320, and Ali et al., Hematol. 2014; 93: 381-384; epidermolytic hyperkeratosis (EHK)—e.g., leucine to proline mutation at position 160 or 161 (if counting the initiator methionine) or a homologous residue in keratin 1 (T>C mutation)—see, e.g., Chipev et al., Cell. 1992; 70: 821-828, see also accession number P04264 in the UNIPROT database at www[dot]uniprot[dot]org; chronic obstructive pulmonary disease (COPD)—e.g., leucine to proline mutation at position 54 or 55 (if counting the initiator methionine) or a homologous residue in the processed form of α₁-antitrypsin or residue 78 in the unprocessed form or a homologous residue (T>C mutation)—see, e.g., Poller et al., Genomics. 1993; 17: 740-743, see also accession number P01011 in the UNIPROT database; Charcot-Marie-Toot disease type 4J—e.g., isoleucine to threonine mutation at position 41 or a homologous residue in FIG. 4 (T>C mutation)—see, e.g., Lenk et al., PLoS Genetics. 2011; 7: e1002104; neuroblastoma (NB)—e.g., leucine to proline mutation at position 197 or a homologous residue in Caspase-9 (T>C mutation)—see, e.g., Kundu et al., 3 Biotech. 2013, 3:225-234; von Willebrand disease (vWD)—e.g., cysteine to arginine mutation at position 509 or a homologous residue in the processed form of von Willebrand factor, or at position 1272 or a homologous residue in the unprocessed form of von Willebrand factor (T>C mutation)—see, e.g., Lavergne et al., Br. J. Haematol. 1992, see also accession number P04275 in the UNIPROT database; 82: 66-72; myotonia congenital—e.g., cysteine to arginine mutation at position 277 or a homologous residue in the muscle chloride channel gene CLCN1 (T>C mutation)—see, e.g., Weinberger et al., The J. of Physiology. 2012; 590: 3449-3464; hereditary renal amyloidosis—e.g., stop codon to arginine mutation at position 78 or a homologous residue in the processed form of apolipoprotein AII or at position 101 or a homologous residue in the unprocessed form (T>C mutation)—see, e.g., Yazaki et al., Kidney Int. 2003; 64: 11-16; dilated cardiomyopathy (DCM)—e.g., tryptophan to Arginine mutation at position 148 or a homologous residue in the FOXD4 gene (T>C mutation), see, e.g., Minoretti et. al., Int. J. of Mol. Med. 2007; 19: 369-372; hereditary lymphedema—e.g., histidine to arginine mutation at position 1035 or a homologous residue in VEGFR3 tyrosine kinase (A>G mutation), see, e.g., Irrthum et al., Am. J. Hum. Genet. 2000; 67: 295-301; familial Alzheimer's disease—e.g., isoleucine to valine mutation at position 143 or a homologous residue in presenilin1 (A>G mutation), see, e.g., Gallo et. al., J. Alzheimer's disease. 2011; 25: 425-431; Prion disease—e.g., methionine to valine mutation at position 129 or a homologous residue in prion protein (A>G mutation)—see, e.g., Lewis et. al., J. of General Virology. 2006; 87: 2443-2449; chronic infantile neurologic cutaneous articular syndrome (CINCA)—e.g., Tyrosine to Cysteine mutation at position 570 or a homologous residue in cryopyrin (A>G mutation)—see, e.g., Fujisawa et. al. Blood. 2007; 109: 2903-2911; and desmin-related myopathy (DRM)—e.g., arginine to glycine mutation at position 120 or a homologous residue in αβ crystallin (A>G mutation)—see, e.g., Kumar et al., J. Biol. Chem. 1999; 274: 24137-24141. The entire contents of all references and database entries is incorporated herein by reference.

[0278] The instant disclosure provides lists of genes comprising pathogenic T>C or A>G mutations. Provided herein, are the names of these genes, their respective SEQ ID NOs, their gene IDs, and sequences flanking the mutation site. (Tables 2 and 3). In some instances, the gRNA sequences that can be used to correct the mutations in these genes are disclosed (Tables 2 and 3).

[0279] In some embodiments, a Cas9-deaminase fusion protein recognizes canonical PAMs and therefore can correct the pathogenic T>C or A>G mutations with canonical PAMs, e.g., NGG (listed in Tables 2 and 3, SEQ ID NOs: 2540-2702 and 5084-5260), respectively, in the flanking sequences. For example, the Cas9 proteins that recognize canonical PAMs comprise an amino acid sequence that is at least 90% identical to the amino acid sequence of Streptococcus pyogenes Cas9 as provided by SEQ ID NO: 10, or to a fragment thereof comprising the RuvC and HNH domains of SEQ ID NO: 10.

[0280] It will be apparent to those of skill in the art that in order to target a Cas9:nucleic acid editing enzyme/domain fusion protein as disclosed herein to a target site, e.g., a site comprising a point mutation to be edited, it is typically necessary to co-express the Cas9:nucleic acid editing enzyme/domain fusion protein together with a guide RNA, e.g., an sgRNA. As explained in more detail elsewhere herein, a guide RNA typically comprises a tracrRNA framework allowing for Cas9 binding, and a guide sequence, which confers sequence specificity to the Cas9:nucleic acid editing enzyme/domain fusion protein. In some embodiments, the guide RNA comprises a structure 5′-[guide sequence]-guuuuagagcuagaaauagcaaguuaaaauaaaggcuaguccguuaucaacuugaaaaaguggcaccgagucggugcuuuuu-3′ (SEQ ID NO: 601), wherein the guide sequence comprises a sequence that is complementary to the target sequence. The guide sequence is typically 20 nucleotides long. The sequences of suitable guide RNAs for targeting Cas9:nucleic acid editing enzyme/domain fusion proteins to specific genomic target sites will be apparent to those of skill in the art based on the instant disclosure. Such suitable guide RNA sequences typically comprise guide sequences that are complementary to a nucleic sequence within 50 nucleotides upstream or downstream of the target nucleotide to be edited. Some exemplary guide RNA sequences suitable for targeting Cas9:nucleic acid editing enzyme/domain fusion proteins to specific target sequences are provided below.

### Base Editor Efficiency

[0281] Some aspects of the disclosure are based on the recognition that any of the base editors provided herein are capable of modifying a specific nucleotide base without generating a significant proportion of indels. An “indel”, as used herein, refers to the insertion or deletion of a nucleotide base within a nucleic acid. Such insertions or deletions can lead to frame shift mutations within a coding region of a gene. In some embodiments, it is desirable to generate base editors that efficiently modify (e.g. mutate or deaminate) a specific nucleotide within a nucleic acid, without generating a large number of insertions or deletions (i.e., indels) in the nucleic acid. In certain embodiments, any of the base editors provided herein are capable of generating a greater proportion of intended modifications (e.g., point mutations or deaminations) versus indels. In some embodiments, the base editors provided herein are capable of generating a ratio of intended point mutations to indels that is greater than 1:1. In some embodiments, the base editors provided herein are capable of generating a ratio of intended point mutations to indels that is at least 1.5:1, at least 2:1, at least 2.5:1, at least 3:1, at least 3.5:1, at least 4:1, at least 4.5:1, at least 5:1, at least 5.5:1, at least 6:1, at least 6.5:1, at least 7:1, at least 7.5:1, at least 8:1, at least 10:1, at least 12:1, at least 15:1, at least 20:1, at least 25:1, at least 30:1, at least 40:1, at least 50:1, at least 100:1, at least 200:1, at least 300:1, at least 400:1, at least 500:1, at least 600:1, at least 700:1, at least 800:1, at least 900:1, or at least 1000:1, or more. The number of intended mutations and indels may be determined using any suitable method, for example the methods used in the below Examples.

[0282] In some embodiments, the base editors provided herein are capable of limiting formation of indels in a region of a nucleic acid. In some embodiments, the region is at a nucleotide targeted by a base editor or a region within 2, 3, 4, 5, 6, 7, 8, 9, or 10 nucleotides of a nucleotide targeted by a base editor. In some embodiments, any of the base editors provided herein are capable of limiting the formation of indels at a region of a nucleic acid to less than 1%, less than 1.5%, less than 2%, less than 2.5%, less than 3%, less than 3.5%, less than 4%, less than 4.5%, less than 5%, less than 6%, less than 7%, less than 8%, less than 9%, less than 10%, less than 12%, less than 15%, or less than 20%. The number of indels formed at a nucleic acid region may depend on the amount of time a nucleic acid (e.g., a nucleic acid within the genome of a cell) is exposed to a base editor. In some embodiments, an number or proportion of indels is determined after at least 1 hour, at least 2 hours, at least 6 hours, at least 12 hours, at least 24 hours, at least 36 hours, at least 48 hours, at least 3 days, at least 4 days, at least 5 days, at least 7 days, at least 10 days, or at least 14 days of exposing a nucleic acid (e.g., a nucleic acid within the genome of a cell) to a base editor.

[0283] Some aspects of the disclosure are based on the recognition that any of the base editors provided herein are capable of efficiently generating an intended mutation, such as a point mutation, in a nucleic acid (e.g. a nucleic acid within a genome of a subject) without generating a significant number of unintended mutations, such as unintended point mutations. In some embodiments, a intended mutation is a mutation that is generated by a specific base editor bound to a gRNA, specifically designed to generate the intended mutation. In some embodiments, the intended mutation is a mutation associated with a disease or disorder. In some embodiments, the intended mutation is a cytosine (C) to thymine (T) point mutation associated with a disease or disorder. In some embodiments, the intended mutation is a guanine (G) to adenine (A) point mutation associated with a disease or disorder. In some embodiments, the intended mutation is a cytosine (C) to thymine (T) point mutation within the coding region of a gene. In some embodiments, the intended mutation is a guanine (G) to adenine (A) point mutation within the coding region of a gene. In some embodiments, the intended mutation is a point mutation that generates a stop codon, for example, a premature stop codon within the coding region of a gene. In some embodiments, the intended mutation is a mutation that eliminates a stop codon. In some embodiments, the intended mutation is a mutation that alters the splicing of a gene. In some embodiments, the intended mutation is a mutation that alters the regulatory sequence of a gene (e.g., a gene promotor or gene repressor). In some embodiments, any of the base editors provided herein are capable of generating a ratio of intended mutations to unintended mutations (e.g., intended point mutations:unintended point mutations) that is greater than 1:1. In some embodiments, any of the base editors provided herein are capable of generating a ratio of intended mutations to unintended mutations (e.g., intended point mutations:unintended point mutations) that is at least 1.5:1, at least 2:1, at least 2.5:1, at least 3:1, at least 3.5:1, at least 4:1, at least 4.5:1, at least 5:1, at least 5.5:1, at least 6:1, at least 6.5:1, at least 7:1, at least 7.5:1, at least 8:1, at least 10:1, at least 12:1, at least 15:1, at least 20:1, at least 25:1, at least 30:1, at least 40:1, at least 50:1, at least 100:1, at least 150:1, at least 200:1, at least 250:1, at least 500:1, or at least 1000:1, or more. It should be appreciated that the characteristics of the base editors described in the “Base Editor Efficiency” section, herein, may be applied to any of the fusion proteins, or methods of using the fusion proteins provided herein.

### Methods for Editing Nucleic Acids

[0284] Some aspects of the disclosure provide methods for editing a nucleic acid. In some embodiments, the method is a method for editing a nucleobase of a nucleic acid (e.g., a base pair of a double-stranded DNA sequence). In some embodiments, the method comprises the steps of: a) contacting a target region of a nucleic acid (e.g., a double-stranded DNA sequence) with a complex comprising a base editor (e.g., a Cas9 domain fused to a cytidine deaminase domain) and a guide nucleic acid (e.g., gRNA), wherein the target region comprises a targeted nucleobase pair, b) inducing strand separation of said target region, c) converting a first nucleobase of said target nucleobase pair in a single strand of the target region to a second nucleobase, and d) cutting no more than one strand of said target region, where a third nucleobase complementary to the first nucleobase base is replaced by a fourth nucleobase complementary to the second nucleobase; and the method results in less than 20% indel formation in the nucleic acid. It should be appreciated that in some embodiments, step b is omitted. In some embodiments, the first nucleobase is a cytosine. In some embodiments, the second nucleobase is a deaminated cytosine, or a uracil. In some embodiments, the third nucleobase is a guanine. In some embodiments, the fourth nucleobase is an adenine. In some embodiments, the first nucleobase is a cytosine, the second nucleobase is a deaminated cytosine, or a uracil, the third nucleobase is a guanine, and the fourth nucleobase is an adenine. In some embodiments, the method results in less than 19%, 18%, 16%, 14%, 12%, 10%, 8%, 6%, 4%, 2%, 1%, 0.5%, 0.2%, or less than 0.1% indel formation. In some embodiments, the method further comprises replacing the second nucleobase with a fifth nucleobase that is complementary to the fourth nucleobase, thereby generating an intended edited base pair (e.g., C:G→T:A). In some embodiments, the fifth nucleobase is a thymine. In some embodiments, at least 5% of the intended basepaires are edited. In some embodiments, at least 10%, 15%, 20%, 25%, 30%, 35%, 40%, 45%, or 50% of the intended basepaires are edited.

[0285] In some embodiments, the ratio of intended products to unintended products in the target nucleotide is at least 2:1, 5:1, 10:1, 20:1, 30:1, 40:1, 50:1, 60:1, 70:1, 80:1, 90:1, 100:1, or 200:1, or more. In some embodiments, the ratio of intended point mutation to indel formation is greater than 1:1, 10:1, 50:1, 100:1, 500:1, or 1000:1, or more. In some embodiments, the cut single strand (nicked strand) is hybridized to the guide nucleic acid. In some embodiments, the cut single strand is opposite to the strand comprising the first nucleobase. In some embodiments, the base editor comprises a Cas9 domain. In some embodiments, the first base is cytosine, and the second base is not a G, C, A, or T. In some embodiments, the second base is uracil. In some embodiments, the first base is cytosine. In some embodiments, the second base is not a G, C, A, or T. In some embodiments, the second base is uracil. In some embodiments, the base editor inhibits base escision repair of the edited strand. In some embodiments, the base editor protects or binds the non-edited strand. In some embodiments, the base editor comprises UGI activity. In some embodiments, the base editor comprises nickase activity. In some embodiments, the intended edited basepair is upstream of a PAM site. In some embodiments, the intended edited base pair is 1, 2, 3, 4, 5, 6, 7, 8, 9, 10, 11, 12, 13, 14, 15, 16, 17, 18, 19, or 20 nucleotides upstream of the PAM site. In some embodiments, the intended edited basepair is downstream of a PAM site. In some embodiments, the intended edited base pair is 1, 2, 3, 4, 5, 6, 7, 8, 9, 10, 11, 12, 13, 14, 15, 16, 17, 18, 19, or 20 nucleotides downstream stream of the PAM site. In some embodiments, the method does not require a canonical (e.g., NGG) PAM site. In some embodiments, the nucleobase editor comprises a linker. In some embodiments, the linker is 1-25 amino acids in length. In some embodiments, the linker is 5-20 amino acids in length. In some embodiments, linker is 10, 11, 12, 13, 14, 15, 16, 17, 18, 19, or 20 amino acids in length. In some embodiments, the target region comprises a target window, wherein the target window comprises the target nucleobase pair. In some embodiments, the target window comprises 1-10 nucleotides. In some embodiments, the target window is 1-9, 1-8, 1-7, 1-6, 1-5, 1-4, 1-3, 1-2, or 1 nucleotides in length. In some embodiments, the target window is 1, 2, 3, 4, 5, 6, 7, 8, 9, 10, 11, 12, 13, 14, 15, 16, 17, 18, 19, or 20 nucleotides in length. In some embodiments, the intended edited base pair is within the target window. In some embodiments, the target window comprises the intended edited base pair. In some embodiments, the method is performed using any of the base editors provided herein. In some embodiments, a target window is a deamination window

[0286] In some embodiments, the disclosure provides methods for editing a nucleotide. In some embodiments, the disclosure provides a method for editing a nucleobase pair of a double-stranded DNA sequence. In some embodiments, the method comprises a) contacting a target region of the double-stranded DNA sequence with a complex comprising a base editor and a guide nucleic acid (e.g., gRNA), where the target region comprises a target nucleobase pair, b) inducing strand separation of said target region, c) converting a first nucleobase of said target nucleobase pair in a single strand of the target region to a second nucleobase, d) cutting no more than one strand of said target region, wherein a third nucleobase complementary to the first nucleobase base is replaced by a fourth nucleobase complementary to the second nucleobase, and the second nucleobase is replaced with a fifth nucleobase that is complementary to the fourth nucleobase, thereby generating an intended edited basepair, wherein the efficiency of generating the intended edited basepair is at least 5%. It should be appreciated that in some embodiments, step b is omitted. In some embodiments, at least 5% of the intended basepaires are edited. In some embodiments, at least 10%, 15%, 20%, 25%, 30%, 35%, 40%, 45%, or 50% of the intended basepaires are edited. In some embodiments, the method causes less than 19%, 18%, 16%, 14%, 12%, 10%, 8%, 6%, 4%, 2%, 1%, 0.5%, 0.2%, or less than 0.1% indel formation. In some embodiments, the ratio of intended product to unintended products at the target nucleotide is at least 2:1, 5:1, 10:1, 20:1, 30:1, 40:1, 50:1, 60:1, 70:1, 80:1, 90:1, 100:1, or 200:1, or more. In some embodiments, the ratio of intended point mutation to indel formation is greater than 1:1, 10:1, 50:1, 100:1, 500:1, or 1000:1, or more. In some embodiments, the cut single strand is hybridized to the guide nucleic acid. In some embodiments, the cut single strand is opposite to the strand comprising the first nucleobase. In some embodiments, the first base is cytosine. In some embodiments, the second nucleobase is not G, C, A, or T. In some embodiments, the second base is uracil. In some embodiments, the base editor inhibits base escision repair of the edited strand. In some embodiments, the base editor protects or binds the non-edited strand. In some embodiments, the nucleobase editor comprises UGI activity. In some embodiments, the nucleobase edit comprises nickase activity. In some embodiments, the intended edited basepair is upstream of a PAM site. In some embodiments, the intended edited base pair is 1, 2, 3, 4, 5, 6, 7, 8, 9, 10, 11, 12, 13, 14, 15, 16, 17, 18, 19, or 20 nucleotides upstream of the PAM site. In some embodiments, the intended edited basepair is downstream of a PAM site. In some embodiments, the intended edited base pair is 1, 2, 3, 4, 5, 6, 7, 8, 9, 10, 11, 12, 13, 14, 15, 16, 17, 18, 19, or 20 nucleotides downstream stream of the PAM site. In some embodiments, the method does not require a canonical (e.g., NGG) PAM site. In some embodiments, the nucleobase editor comprises a linker. In some embodiments, the linker is 1-25 amino acids in length. In some embodiments, the linker is 5-20 amino acids in length. In some embodiments, the linker is 10, 11, 12, 13, 14, 15, 16, 17, 18, 19, or 20 amino acids in length. In some embodiments, the target region comprises a target window, wherein the target window comprises the target nucleobase pair. In some embodiments, the target window comprises 1-10 nucleotides. In some embodiments, the target window is 1-9, 1-8, 1-7, 1-6, 1-5, 1-4, 1-3, 1-2, or 1 nucleotides in length. In some embodiments, the target window is 1, 2, 3, 4, 5, 6, 7, 8, 9, 10, 11, 12, 13, 14, 15, 16, 17, 18, 19, or 20 nucleotides in length. In some embodiments, the intended edited base pair occurs within the target window. In some embodiments, the target window comprises the intended edited base pair. In some embodiments, the nucleobase editor is any one of the base editors provided herein.

### Kits, Vectors, Cells

[0287] Some aspects of this disclosure provide kits comprising a nucleic acid construct, comprising (a) a nucleotide sequence encoding a Cas9 protein or a Cas9 fusion protein as provided herein; and (b) a heterologous promoter that drives expression of the sequence of (a). In some embodiments, the kit further comprises an expression construct encoding a guide RNA backbone, wherein the construct comprises a cloning site positioned to allow the cloning of a nucleic acid sequence identical or complementary to a target sequence into the guide RNA backbone.

[0288] Some aspects of this disclosure provide polynucleotides encoding a Cas9 protein of a fusion protein as provided herein. Some aspects of this disclosure provide vectors comprising such polynucleotides. In some embodiments, the vector comprises a heterologous promoter driving expression of polynucleotide.

[0289] Some aspects of this disclosure provide cells comprising a Cas9 protein, a fusion protein, a nucleic acid molecule encoding the fusion protein, a complex comprise the Cas9 protein and the gRNA, and/or a vector as provided herein.

[0290] The description of exemplary embodiments of the reporter systems above is provided for illustration purposes only and not meant to be limiting. Additional reporter systems, e.g., variations of the exemplary systems described in detail above, are also embraced by this disclosure.

### EXAMPLES

### Example 1: Cas9 Deaminase Fusion Proteins

[0291] A number of Cas9:Deaminase fusion proteins were generated and deaminase activity of the generated fusions was characterized. The following deaminases were tested:

Human AID (hAID):
(SEQ ID NO: 607)
MDSLLMNRRKFLYQFKNVRWAKGRRETYLCYVVKRRDSATSFSLD
FGYLRNKNGCHVELLFLRYISDWDLDPGRCYRVTWFTSWSPCYDC
ARHVADFLRGNPYLSLRIFTARLYFCEDRKAEPEGLRRLHRAGVQ
IAIMTFKDYFYCWNTFVENHERTFKAWEGLHENSVRLSRQLRRIL
LPLYEVDDLRDAFRTLGLLD
Human AID-DC (hAID-DC, truncated version
of hAID with 7-fold increased activity):
(SEQ ID NO: 608)
MDSLLMNRRKFLYQFKNVRWAKGRRETYLCYVVKRRDSATSFSLD
FGYLRNKNGCHVELLFLRYISDWDLDPGRCYRVTWFTSWSPCYDC
ARHVADFLRGNPNLSLRIFTARLYFCEDRKAEPEGLRRLHRAGVQ
IAIMTFKDYFYCWNTFVENHERTFKAWEGLHENSVRLSRQLRRIL
L
Rat APOBEC1 (rAPOBEC1):
(SEQ ID NO: 284)
MSSETGPVAVDPTLRRRIEPHEFEVFFDPRELRKETCLLYEINWG
GRHSIWRHTSQNTNKHVEVNFIEKFTTERYFCPNTRCSITWFLSW
SPCGECSRAITEFLSRYPHVTLFIYIARLYHHADPRNRQGLRDLI
SSGVTIQIMTEQESGYCWRNFVNYSPSNEAHWPRYPHLWVRLYVL
ELYCIILGLPPCLNILRRKQPQLTFFTIALQSCHYQRLPPHILWA
TGLK
Human APOBEC1 (hAPOBEC1)
(SEQ ID NO: 5724)
MTSEKGPSTGDPTLRRRIEPWEFDVFYDPRELRKEACLLYEIKWG
MSRKIWRSSGKNTTNHVEVNFIKKFTSERDFHPSMSCSITWFLSW
SPCWECSQAIREFLSRHPGVTLVIYVARLFWHMDQQNRQGLRDLV
NSGVTIQIMRASEYYHCWRNFVNYPPGDEAHWPQYPPLWMMLYAL
ELHCIILSLPPCLKISRRWQNHLTFFRLHLQNCHYQTIPPHILLA
TGLIHPSVAWR
Petromyzon marinus (Lamprey) CDA1 (pmCDA1):
(SEQ ID NO: 609)
MTDAEYVRIHEKLDIYTFKKQFFNNKKSVSHRCYVLFELKRRGER
RACFWGYAVNKPQSGTERGIHAEIFSIRKVEEYLRDNPGQFTINW
YSSWSPCADCAEKILEWYNQELRGNGHTLKIWACKLYYEKNARNQ
IGLWNLRDNGVGLNVMVSEHYQCCRKIFIQSSHNQLNENRWLEKT
LKRAEKRRSELSIMIQVKILHTTKSPAV
Human APOBEC3G (hAPOBEC3G):
(SEQ ID NO: 610)
MELKYHPEMRFFHWFSKWRKLHRDQEYEVTWYISWSPCTKCTRDM
ATFLAEDPKVTLTIFVARLYYFWDPDYQEALRSLCQKRDGPRATM
KIMNYDEFQHCWSKFVYSQRELFEPWNNLPKYYILLHIMLGEILR
HSMDPPTFTFNFNNEPWVRGRHETYLCYEVERMHNDTWVLLNQRR
GFLCNQAPHKHGFLEGRHAELCFLDVIPFWKLDLDQDYRVTCFTS
WSPCFSCAQEMAKFISKNKHVSLCIFTARIYDDQGRCQEGLRTLA
EAGAKISIMTYSEFKHCWDTFVDHQGCPFQPWDGLDEHSQDLSGR
LRAILQNQEN

[0292] Deaminase Activity on ssDNA. A USER (Uracil-Specific Excision Reagent) Enzyme-based assay for deamination was employed to test the activity of various deaminases on single-stranded DNA (ssDNA) substrates. USER Enzyme was obtained from New England Biolabs. An ssDNA substrate was provided with a target cytosine residue at different positions. Deamination of the ssDNA cytosine target residue results in conversion of the target cytosine to a uracil. The USER Enzyme excises the uracil base and cleaves the ssDNA backbone at that position, cutting the ssDNA substrate into two shorter fragments of DNA. In some assays, the ssDNA substrate is labeled on one end with a dye, e.g., with a 5′ Cy3 label (the * in the scheme below). Upon deamination, excision, and cleavage of the strand, the substrate can be subjected to electrophoresis, and the substrate and any fragment released from it can be visualized by detecting the label. Where Cy5 is images, only the fragment with the label will be visible via imaging.

[0293] In one USER Enzyme assay, ssDNA substrates were used that matched the target sequences of the various deaminases tested. Expression cassettes encoding the deaminases tested were inserted into a CMV backbone plasmid that has been used previously in the lab (Addgene plasmid 52970). The deaminase proteins were expressed using a TNT Quick Coupled Transcription/Translation System (Promega) according to the manufacturers recommendations. After 90 min of incubation, 5 mL of lysate was incubated with 5′ Cy3-labeled ssDNA substrate and 1 unit of USER Enzyme (NEB) for 3 hours. The DNA was resolved on a 10% TBE PAGE gel and the DNA was imaged using Cy-dye imaging. A schematic representation of the USER Enzyme assay is shown in FIG. 41.

[0294] FIG. 1 shows the deaminase activity of the tested deaminases on ssDNA substrates, such as Doench 1, Doench 2, G7′ and VEGF Target 2. The rAPOBEC1 enzyme exhibited a substantial amount of deamination on the single-stranded DNA substrate with a canonical NGG PAM, but not with a negative control non-canonical NNN PAM.

Cas9 fusion proteins with APOBEC family deaminases were generated. The following fusion architectures were constructed and tested on ssDNA:

rAPOBEC1-GGS-dCas9 primary sequence
(SEQ ID NO: 611)
MSSETGPVAVDPTLRRRIEPHEFEVFFDPRELRKETCLLYEINWGGRHSIWRHTSQNTNK
HVEVNFIEKFTTERYFCPNTRCSITWFLSWSPCGECSRAITEFLSRYPHVTLFIYIARLYHH
ADPRNRQGLRDLISSGVTIQIMTEQESGYCWRNFVNYSPSNEAHWPRYPHLWVRLYVLE

[chemical structure]

NSVGWAVITDEYKVPSKKFKVLGNTDRHSIKKNLIGALLFDSGETAEATRLKRTARRRYT
RRKNRICYLQEIFSNEMAKVDDSFFHRLEESFLVEEDKKHERHPIFGNIVDEVAYHEKYP
TIYHLRKKLVDSTDKADLRLIYLALAHMIKFRGHFLIEGDLNPDNSDVDKLFIQLVQTYN
QLFEENPINASGVDAKAILSARLSKSRRLENLIAQLPGEKKNGLFGNLIALSLGLTPNFKS
NFDLAEDAKLQLSKDTYDDDLDNLLAQIGDQYADLFLAAKNLSDAILLSDILRVNTEITKA
PLSASMIKRYDEHHQDLTLLKALVRQQLPEKYKEIFFDQSKNGYAGYIDGGASQEEFYKF
IKPILEKMDGTEELLVKLNREDLLRKQRTFDNGSIPHQIHLGELHAILRRQEDFYPFLKD
NREKIEKILTFRIPYYVGPLARGNSRFAWMTRKSEETITPWNFEEVVDKGASAQSFIERM
TNFDKNLPNEKVLPKHSLLYEYFTVYNELTKVKYVTEGMRKPAFLSGEQKKAIVDLLFKT
NRKVTVKOLKEDYFKKIECFDSVEISGVEDRFNASLGTYHDLLKIIKDKDFLDNEENEDIL
EDIVLTLTLFEDREMIEERLKTYAHLFDDKVMKQLKRRRYTGWGRLSRKLINGIRDKQSG
KTILDFLKSDGFANRNFMQLIHDDSLTFKEDIQKAQVSGQGDSLHEHIANLAGSPAIKKG
ILQTVKVVDELVKVMGRHKPENIVIEMARENQTTQKGQKNSRERMKRIEEGIKELGSQIL
KEHPVENTQLQNEKLYLYYLQNGRDMYVDQELDINRLSDYDVDAIVPQSFLKDDSIDNK
VLTRSDKNRGKSDNVPSEEVVKKMKNYWRQLLNAKLITQRKFDNLTKAERGGLSELDKA
GFIKRQLVETRQITKHVAQILDSRMNTKYDENDKLIREVKVITLKSKLVSDFRKDFQFYKV
REINNYHHAHDAYLNAVVGTALIKKYPKLESEFVYGDYKVYDVRKMIAKSEQEIGKATAK
YFFYSNIMNFFKTEITLANGEIRKRPLIETNGETGEIVWDKGRDFATVRKVLSMPQVNIV
KKTEVQTGGFSKESILPKRNSDKLIARKKDWDPKKYGGFDSPTVAYSVLVVAKVEKGKSK
KLKSVKELLGITIMERSSFEKNPIDFLEAKGYKEVKKDLIIKLPKYSLFELENGRKRMLAS
AGELQKGNELALPSKYVNFLYLASHYEKLKGSPEDNEQKQLFVEQHKHYLDEIIEQISEF
SKRVILADANLDKVLSAYNKHRDKPIREQAENIIHLFTLTNLGAPAAFKYFDTTIDRKRYT
STKEVLDATLIHQSITGLYETRIDLSQLGGD
rAPOBEC1-(GGS)3-dCas9 primary sequence
(SEQ ID NO: 612)
MSSETGPVAVDPTLRRRIEPHEFEVFFDPRELRKETCLLYEINWGGRHSIWRHTSONTNK
HVEVNFIEKFTTERYFCPNTRCSITWFLSWSPCGECSRAITEFLSRYPHVTLFIYIARLYHH
ADPRNROGLRDLISSGVTIQIMTEQESGYCWRNFVNYSPSNEAHWPRYPHLWVRLYVLE

[chemical structure]

YSIGLAIGTNSVGWAVITDEYKVPSKKFKVLGNTDRHSIKKNLIGALLFDSGETAEATRLK
RTARRRYTRRKNRICYLQEIFSNEMAKVDDSFFHRLEESFLVEEDKKHERHPIFGNIVDE
VAYHEKYPTIYHLRKKLVDSTDKADLRLIYLALAHMIKFRGHFLIEGDLNPDNSDVDKLFI
QLVQTYNQLFEENPINASGVDAKAILSARLSKSRRLENLIAQLPGEKKNGLFGNLIALSLG
LTPNFKSNFDLAEDAKLQLSKDTYDDDLDNLLAQIGDQYADLFLAAKNLSDAILLSDILR
VNTEITKAPLSASMIKRYDEHHQDLTLLKALVRQQLPEKYKEIFFDQSKNGYAGYIDGGA
SQEEFYKFIKPILEKMDGTEELLVKLNREDLLRKORTFDNGSIPHQIHLGELHAILRRQE
DFYPFLKDNREKIEKILTFRIPYYVGPLARGNSRFAWMTRKSEETITPWNFEEVVDKGAS
AQSFIERMTNFDKNLPNEKVLPKHSLLYEYFTVYNELTKVKYVTEGMRKPAFLSGEQKK
AIVDLLFKTNRKVTVKOLKEDYFKKIECFDSVEISGVEDRFNASLGTYHDLLKIIKDKDFL
DNEENEDILEDIVLTLTLFEDREMIEERLKTYAHLFDDKVMKOLKRRRYTGWGRLSRKLI
NGIRDKQSGKTILDFLKSDGFANRNFMQLIHDDSLTFKEDIQKAQVSGQGDSLHEHIANL
AGSPAIKKGILQTVKVVDELVKVMGRHKPENIVIEMARENQTTQKGQKNSRERMKRIEE
GIKELGSQILKEHPVENTQLQNEKLYLYYLQNGRDMYVDQELDINRLSDYDVDAIVPQSF
LKDDSIDNKVLTRSDKNRGKSDNVPSEEVVKKMKNYWRQLLNAKLITQRKFDNLTKAER
GGLSELDKAGFIKRQLVETRQITKHVAQILDSRMNTKYDENDKLIREVKVITLKSKLVSDF
RKDFQFYKVREINNYHHAHDAYLNAVVGTALIKKYPKLESEFVYGDYKVYDVRKMIAKSE
QEIGKATAKYFFYSNIMNFFKTEITLANGEIRKRPLIETNGETGEIVWDKGRDFATVRKVL
SMPQVNIVKKTEVQTGGFSKESILPKRNSDKLIARKKDWDPKKYGGFDSPTVAYSVLVVA
KVEKGKSKKLKSVKELLGITIMERSSFEKNPIDFLEAKGYKEVKKDLIIKLPKYSLFELENG
RKRMLASAGELQKGNELALPSKYVNFLYLASHYEKLKGSPEDNEQKQLFVEQHKHYLDE
IIEQISEFSKRVILADANLDKVLSAYNKHRDKPIREQAENIIHLFTLTNLGAPAAFKYFDTT
IDRKRYTSTKEVLDATLIHQSITGLYETRIDLSQLGGD

[chemical structure]

(SEQ ID NO: 613)
DKKYSIGLAIGTNSVGWAVITDEYKVPSKKFKVLGNTDRHSIKKNLIGALLFDSGETAEAT
RLKRTARRRYTRRKNRICYLQEIFSNEMAKVDDSFFHRLEESFLVEEDKKHERHPIFGNI
VDEVAYHEKYPTIYHLRKKLVDSTDKADLRLIYLALAHMIKFRGHFLIEGDLNPDNSDVD
KLFIQLVQTYNQLFEENPINASGVDAKAILSARLSKSRRLENLIAQLPGEKKNGLFGNLIA
LSLGLTPNFKSNFDLAEDAKLQLSKDTYDDDLDNLLAQIGDQYADLFLAAKNLSDAILLS
DILRVNTEITKAPLSASMIKRYDEHHQDLTLLKALVRQQLPEKYKEIFFDQSKNGYAGYID
GGASQEEFYKFIKPILEKMDGTEELLVKLNREDLLRKQRTFDNGSIPHQIHLGELHAILR
RQEDFYPFLKDNREKIEKILTFRIPYYVGPLARGNSRFAWMTRKSEETITPWNFEEVVDK
GASAQSFIERMTNFDKNLPNEKVLPKHSLLYEYFTVYNELTKVKYVTEGMRKPAFLSGE
QKKAIVDLLFKTNRKVTVKQLKEDYFKKIECFDSVEISGVEDRFNASLGTYHDLLKIIKDK
DFLDNEENEDILEDIVLTLTLFEDREMIEERLKTYAHLFDDKVMKOLKRRRYTGWGRLS
RKLINGIRDKQSGKTILDFLKSDGFANRNFMQLIHDDSLTFKEDIQKAQVSGQGDSLHEH
IANLAGSPAIKKGILQTVKVVDELVKVMGRHKPENIVIEMARENQTTQKGQKNSRERMK
RIEEGIKELGSQILKEHPVENTQLQNEKLYLYYLONGRDMYVDQELDINRLSDYDVDAIV
PQSFLKDDSIDNKVLTRSDKNRGKSDNVPSEEVVKKMKNYWRQLLNAKLITQRKFDNLT
KAERGGLSELDKAGFIKRQLVETRQITKHVAQILDSRMNTKYDENDKLIREVKVITLKSKL
VSDFRKDFQFYKVREINNYHHAHDAYLNAVVGTALIKKYPKLESEFVYGDYKVYDVRKM
IAKSEQEIGKATAKYFFYSNIMNFFKTEITLANGEIRKRPLIETNGETGEIVWDKGRDFAT
VRKVLSMPQVNIVKKTEVQTGGFSKESILPKRNSDKLIARKKDWDPKKYGGFDSPTVAYS
VLVVAKVEKGKSKKLKSVKELLGITIMERSSFEKNPIDFLEAKGYKEVKKDLIIKLPKYSLF
ELENGRKRMLASAGELQKGNELALPSKYVNFLYLASHYEKLKGSPEDNEQKQLFVEQHK
HYLDEIIEQISEFSKRVILADANLDKVLSAYNKHRDKPIREQAENIIHLFTLTNLGAPAAFK

[chemical structure]

RRIEPHEFEVFFDPRELRKETCLLYEINWGGRHSIWRHTSONTNKHVEVNFIEKFTTERYF
CPNTRCSITWFLSWSPCGECSRAITEFLSRYPHVTLFIYIARLYHHADPRNROGLRDLISSG
VTIQIMTEQESGYCWRNFVNYSPSNEAHWPRYPHLWVRLYVLELYCIILGLPPCLNILRR
KQPQLTFFTIALQSCHYQRLPPHILWATGLK

[chemical structure]

(SEQ ID NO: 614)
DKKYSIGLAIGTNSVGWAVITDEYKVPSKKFKVLGNTDRHSIKKNLIGALLFDSGETAEAT
RLKRTARRRYTRRKNRICYLQEIFSNEMAKVDDSFFHRLEESFLVEEDKKHERHPIFGNI
VDEVAYHEKYPTIYHLRKKLVDSTDKADLRLIYLALAHMIKFRGHFLIEGDLNPDNSDVD
KLFIQLVQTYNQLFEENPINASGVDAKAILSARLSKSRRLENLIAQLPGEKKNGLFGNLIA
LSLGLTPNFKSNFDLAEDAKLQLSKDTYDDDLDNLLAQIGDQYADLFLAAKNLSDAILLS
DILRVNTEITKAPLSASMIKRYDEHHQDLTLLKALVRQQLPEKYKEIFFDQSKNGYAGYID
GGASQEEFYKFIKPILEKMDGTEELLVKLNREDLLRKQRTFDNGSIPHQIHLGELHAILR
RQEDFYPFLKDNREKIEKILTFRIPYYVGPLARGNSRFAWMTRKSEETITPWNFEEVVDK
GASAQSFIERMTNFDKNLPNEKVLPKHSLLYEYFTVYNELTKVKYVTEGMRKPAFLSGE
QKKAIVDLLFKTNRKVTVKQLKEDYFKKIECFDSVEISGVEDRFNASLGTYHDLLKIIKDK
DFLDNEENEDILEDIVLTLTLFEDREMIEERLKTYAHLFDDKVMKQLKRRRYTGWGRLS
RKLINGIRDKQSGKTILDFLKSDGFANRNFMQLIHDDSLTFKEDIQKAQVSGQGDSLHEH
IANLAGSPAIKKGILQTVKVVDELVKVMGRHKPENIVIEMARENQTTQKGQKNSRERMK
RIEEGIKELGSQILKEHPVENTQLQNEKLYLYYLQNGRDMYVDQELDINRLSDYDVDAIV
PQSFLKDDSIDNKVLTRSDKNRGKSDNVPSEEVVKKMKNYWRQLLNAKLITQRKFDNLT
KAERGGLSELDKAGFIKRQLVETRQITKHVAQILDSRMNTKYDENDKLIREVKVITLKSKL
VSDFRKDFQFYKVREINNYHHAHDAYLNAVVGTALIKKYPKLESEFVYGDYKVYDVRKM
IAKSEQEIGKATAKYFFYSNIMNFFKTEITLANGEIRKRPLIETNGETGEIVWDKGRDFAT
VRKVLSMPQVNIVKKTEVQTGGFSKESILPKRNSDKLIARKKDWDPKKYGGFDSPTVAYS
VLVVAKVEKGKSKKLKSVKELLGITIMERSSFEKNPIDFLEAKGYKEVKKDLIIKLPKYSLF
ELENGRKRMLASAGELQKGNELALPSKYVNFLYLASHYEKLKGSPEDNEQKQLFVEQHK
HYLDEIIEQISEFSKRVILADANLDKVLSAYNKHRDKPIREQAENIIHLFTLTNLGAPAAFK

[chemical structure]

VDPTLRRRIEPHEFEVFFDPRELRKETCLLYEINWGGRHSIWRHTSONTNKHVEVNFIEKF
TTERYFCPNTRCSITWFLSWSPCGECSRAITEFLSRYPHVTLFIYIARLYHHADPRNRQGLR
DLISSGVTIQIMTEQESGYCWRNFVNYSPSNEAHWPRYPHLWVRLYVLELYCIILGLPPCL
NILRRKOPOLTFFTIALOSCHYQRLPPHILWATGLK

[chemical structure]

(SEQ ID NO: 615)
MSSETGPVAVDPTLRRRIEPHEFEVFFDPRELRKETCLLYEINWGGRHSIWRHTSONTNK
HVEVNFIEKFTTERYFCPNTRCSITWFLSWSPCGECSRAITEFLSRYPHVTLFIYIARLYHH
ADPRNROGLRDLISSGVTIQIMTEQESGYCWRNFVNYSPSNEAHWPRYPHLWVRLYVLE

[chemical structure]

[chemical structure]

TRLKRTARRRYTRRKNRICYLQEIFSNEMAKVDDSFFHRLEESFLVEEDKKHERHPIFGN
IVDEVAYHEKYPTIYHLRKKLVDSTDKADLRLIYLALAHMIKFRGHFLIEGDLNPDNSDV
DKLFIQLVQTYNQLFEENPINASGVDAKAILSARLSKSRRLENLIAQLPGEKKNGLFGNLI
ALSLGLTPNFKSNFDLAEDAKLQLSKDTYDDDLDNLLAQIGDQYADLFLAAKNLSDAILL
SDILRVNTEITKAPLSASMIKRYDEHHQDLTLLKALVRQQLPEKYKEIFFDQSKNGYAGYI
DGGASQEEFYKFIKPILEKMDGTEELLVKLNREDLLRKORTFDNGSIPHQIHLGELHAIL
RRQEDFYPFLKDNREKIEKILTFRIPYYVGPLARGNSRFAWMTRKSEETITPWNFEEVVD
KGASAQSFIERMTNFDKNLPNEKVLPKHSLLYEYFTVYNELTKVKYVTEGMRKPAFLSGE
QKKAIVDLLFKTNRKVTVKQLKEDYFKKIECFDSVEISGVEDRFNASLGTYHDLLKIIKDK
DFLDNEENEDILEDIVLTLTLFEDREMIEERLKTYAHLFDDKVMKOLKRRRYTGWGRLS
RKLINGIRDKQSGKTILDFLKSDGFANRNFMQLIHDDSLTFKEDIQKAQVSGQGDSLHEH
IANLAGSPAIKKGILQTVKVVDELVKVMGRHKPENIVIEMARENQTTQKGQKNSRERMK
RIEEGIKELGSQILKEHPVENTQLQNEKLYLYYLQNGRDMYVDQELDINRLSDYDVDAIV
PQSFLKDDSIDNKVLTRSDKNRGKSDNVPSEEVVKKMKNYWRQLLNAKLITQRKFDNLT
KAERGGLSELDKAGFIKRQLVETRQITKHVAQILDSRMNTKYDENDKLIREVKVITLKSKL
VSDFRKDFQFYKVREINNYHHAHDAYLNAVVGTALIKKYPKLESEFVYGDYKVYDVRKM
IAKSEQEIGKATAKYFFYSNIMNFFKTEITLANGEIRKRPLIETNGETGEIVWDKGRDFAT
VRKVLSMPQVNIVKKTEVQTGGFSKESILPKRNSDKLIARKKDWDPKKYGGFDSPTVAYS
VLVVAKVEKGKSKKLKSVKELLGITIMERSSFEKNPIDFLEAKGYKEVKKDLIIKLPKYSLF
ELENGRKRMLASAGELQKGNELALPSKYVNFLYLASHYEKLKGSPEDNEQKQLFVEQHK
HYLDEIIEQISEFSKRVILADANLDKVLSAYNKHRDKPIREQAENIIHLFTLTNLGAPAAFK
YFDTTIDRKRYTSTKEVLDATLIHQSITGLYETRIDLSQLGGD

[0295] FIG. 2 shows that the N-terminal deaminase fusions showed significant activity on the single stranded DNA substrates. For this reason, only the N-terminal architecture was chosen for further experiments.

[0296] FIG. 3 illustrates double stranded DNA substrate binding by deaminase-dCas9:sgRNA complexes. A number of double stranded deaminase substrate sequences were generated. The sequences are provided below. The structures according to FIG. 3 are identified in these sequences (36bp: underlined, sgRNA target sequence: bold; PAM: boxed; 21bp: italicized). All substrates were labeled with a 5′-Cy3 label:

(SEQ ID NO: 616)

[chemical structure]

[chemical structure]

(SEQ ID NO: 617)

[chemical structure]

[chemical structure]

(SEQ ID NO: 618)

[chemical structure]

[chemical structure]

(SEQ ID NO: 619)

[chemical structure]

[chemical structure]

(SEQ ID NO: 620)

[chemical structure]

[chemical structure]

(SEQ ID NO: 621)

[chemical structure]

[chemical structure]

(SEQ ID NO: 622)

[chemical structure]

[chemical structure]

(SEQ ID NO: 623)

[chemical structure]

[chemical structure]

(SEQ ID NO: 624)
10:GTAGGTAGTTAGGATGAATGGAAGGTTGGTATAGCCATTATATTCCGCGGATTTAT

[chemical structure]

(SEQ ID NO: 625)
11:GTAGGTAGTTAGGATGAATGGAAGGTTGGTATAGCCTATTATATTCCGCGGATTTA

[chemical structure]

(SEQ ID NO: 626)
12:GTAGGTAGTTAGGATGAATGGAAGGTTGGTATAGCCTTATTATATTCCGCGGATTT

[chemical structure]

(SEQ ID NO: 627)
13:GTAGGTAGTTAGGATGAATGGAAGGTTGGTATAGCCATTATTATATTCCGCGGATT

[chemical structure]

(SEQ ID NO: 628)
14:GTAGGTAGTTAGGATGAATGGAAGGTTGGTATAGCCTATTATTATATTCCGCGGAT

[chemical structure]

(SEQ ID NO: 629)
15: GTAGGTAGTTAGGATGAATGGAAGGTTGGTATAGCCATTATTATTATTACCGCGGA

[chemical structure]

(SEQ ID NO: 630)

[chemical structure]

[chemical structure]

“-”:
(SEQ ID NO: 631)

[chemical structure]

ATGACCTCTGGATCCATGGAC-3′
(SEQ ID NO: 632)

[chemical structure]

[chemical structure]

*In all substrates except for “8U”, the top strand in FIG. 3 is the
complement of the sequence specified here. In the case of “8U”, there is a
“G” opposite the U.

[0297] FIG. 4 shows the results of a double stranded DNA Deamination Assay. The fusions were expressed and purified with an N-terminal His6 tag via both Ni-NTA and sepharose chromatography. In order to assess deamination on dsDNA substrates, the various dsDNA substrates shown on the previous slide were incubated at a 1:8 dsDNA:fusion protein ratio and incubated at 37° C. for 2 hours. Once the dCas9 portion of the fusion binds to the DNA it blocks access of the USER enzyme to the DNA. Therefore, the fusion proteins were denatured following the incubation and the dsDNA was purified on a spin column, followed by incubation for 45 min with the USER Enzyme and resolution of the resulting DNA substrate and substrate fragments on a 10% TBE-urea gel.

[0298] FIG. 5 demonstrates that Cas9 fusions can target positions 3-11 of double-stranded DNA target sequences (numbered according to the schematic in FIG. 3). Upper Gel: 1 μM rAPOBEC1-GGS-dCas9, 125 nM dsDNA, 1 eq sgRNA. Mid Gel: 1 μM rAPOBEC1-(GGS)₃-dCas9, 125 nM dsDNA, 1 eq sgRNA. Lower Gel: 1.85 μM rAPOBEC1-XTEN-dCas9, 125 nM dsDNA, 1 eq sgRNA. Based on the data from these gels, positions 3-11 (according to the numbering in FIG. 3) are sufficiently exposed to the activity of the deaminase to be targeted by the fusion proteins tested. Access of the deaminase to other positions is most likely blocked by the dCas9 protein.

[0299] The data further indicates that a linker of only 3 amino acids (GGS) is not optimal for allowing the deaminase to access the single stranded portion of the DNA. The 9 amino acid linker [(GGS)₃](SEQ ID NO: 596) and the more structured 16 amino acid linker (XTEN) allow for more efficient deamination.

[0300] FIG. 6 demonstrates that the correct guide RNA, e.g., the correct sgRNA, is required for deaminase activity. The gel shows that fusing the deaminase to dCas9, the deaminase enzyme becomes sequence specific (e.g., using the fusion with an eGFP sgRNA results in no deamination), and also confers the capacity to the deaminase to deaminate dsDNA. The native substrate of the deaminase enzyme is ssDNA, and no deamination occurred when no sgRNA was added. This is consistent with reported knowledge that APOBEC deaminase by itself does not deaminate dsDNA. The data indicates that Cas9 opens the double-stranded DNA helix within a short window, exposing single-stranded DNA that is then accessible to the APOBEC deaminase for cytidine deamination. The sgRNA sequences used are provided below. sequences (36bp: underlined, sgRNA target sequence: bold; PAM: boxed; 21bp: italicized)

### DNA Sequence 8:

(SEQ ID NO: 633)
5′-Cy3-GTAGGTAGTTAGGATGAATGGAAGGTTGGTATAGCCATTATTCCGCGGATTTATT

[chemical structure]

Correct sgRNA sequence (partial 3′ sequence):
(SEQ ID NO: 634)
5′-AUUAUUCCGCGGAUUUAUUUGUUUUAGAGCUAG ...-3′
eGFP sgRNA sequence (partial 3′-sequence):
(SEQ ID NO: 635)
5′-CGUAGGCCAGGGUGGUCACGGUUUUAGAGCUAG ...-3′

### Example 2: Deamination of DNA Target Sequence

[0301] Exemplary deamination targets. The dCas9:deaminase fusion proteins described herein can be delivered to a cell in vitro or ex vivo or to a subject in vivo and can be used to effect C to T or G to A transitions when the target nucleotide is in positions 3-11 with respect to a PAM. Exemplary deamination targets include, without limitation, the following: CCR5 truncations: any of the codons encoding Q93, Q102, Q186, R225, W86, or Q261 of CCR5 can be deaminated to generate a STOP codon, which results in a nonfunctional truncation of CCR5 with applications in HIV treatment. APOE4 mutations: mutant codons encoding C11R and C57R mutant APOE4 proteins can be deaminated to revert to the wild-type amino acid with applications in Alzheimer's treatment. eGFP truncations: any of the codons encoding Q158, Q184, Q185 can be deaminated to generate a STOP codon, or the codon encoding M1 can be deaminated to encode I, all of which result in loss of eGFP fluorescence, with applications in reporter systems. eGFP restoration: a mutant codon encoding T65A or Y66C mutant GFP, which does not exhibit substantial fluorescence, can be deaminated to restore the wild-type amino acid and confer fluorescence. PIK3CA mutation: a mutant codon encoding K111E mutant PIK3CA can be deaminated to restore the wild-type amino acid residue with applications in cancer. CTNNB1 mutation: a mutant codon encoding T41A mutant CTNNB1 can be deaminated to restore the wild-type amino acid residue with applications in cancer. HRAS mutation: a mutant codon encoding Q61R mutant HRAS can be deaminated to restore the wild-type amino acid residue with applications in cancer. P53 mutations: any of the mutant codons encoding Y163C, Y236C, or N239D mutant p53 can be deaminated to encode the wild type amino acid sequence with applications in cancer.

[0302] The feasibility of deaminating these target sequences in double-stranded DNA is demonstrated in FIGS. 7 and 8. FIG. 7 illustrates the mechanism of target DNA binding of in vivo target sequences by deaminase-dCas9:sgRNA complexes.

[0303] FIG. 8 shows successful deamination of exemplary disease-associated target sequences. Upper Gel: CCR5 Q93: coding strand target in pos. 10 (potential off-targets at positions 2, 5, 6, 8, 9); CCR5 Q102: coding strand target in pos. 9 (potential off-targets at positions 1, 12, 14); CCR5 Q186: coding strand target in pos. 9 (potential off-targets at positions 1, 5, 15); CCR5 R225: coding strand target in pos. 6 (no potential off-targets); eGFP Q158: coding strand target in pos. 5 (potential off-targets at positions 1, 13, 16); eGFP Q184/185: coding strand target in pos. 4 and 7 (potential off-targets at positions 3, 12, 14, 15, 16, 17, 18); eGFP M1: template strand target in pos. 12 (potential off-targets at positions 2, 3, 7, 9, 11) (targets positions 7 and 9 to small degree); eGFP T65A: template strand target in pos. 7 (potential off-targets at positions 1, 8, 17); PIK3CA K111E: template strand target in pos. 2 (potential off-targets at positions 5, 8, 10, 16, 17); PIK3CA K111E: template strand target in pos. 13 (potential off-targets at positions 11, 16, 19) X. Lower Gel: CCR5 W86: template strand target in pos. 2 and 3 (potential off-targets at positions 1, 13) X; APOE4 C11R: coding strand target in pos. 11 (potential off-targets at positions 7, 13, 16, 17); APOE4 C57R: coding strand target in pos. 5) (potential off-targets at positions 7, 8, 12); eGFP Y66C: template strand target in pos. 11 (potential off-targets at positions 1, 4, 6, 8, 9, 16); eGFP Y66C: template strand target in pos. 3 (potential off-targets at positions 1, 8, 17); CCR5 Q261: coding strand target in pos. 10 (potential off-targets at positions 3, 5, 6, 9, 18); CTNNB1 T41A: template strand target in pos. 7 (potential off-targets at positions 1, 13, 15, 16) X; HRAS Q61R: template strand target in pos. 6 (potential off-targets at positions 1, 2, 4, 5, 9, 10, 13); p53 Y163C: template strand target in pos. 6 (potential off-targets at positions 2, 13, 14); p53 Y236C: template strand target in pos. 8 (potential off-targets at positions 2, 4); p53 N239D: template strand target in pos. 4 (potential off-targets at positions 6, 8). Exemplary DNA sequences of disease targets are provided below (PAMs (5′-NGG-3′) and target positions are boxed):

(SEQ ID NO: 636)
CCR5 Q93: 5′-Cy3-GTAGGTAGTTAGGATGAATGGAAGGTTGGTAACTATGCTGCCGCC

[chemical structure]

(SEQ ID NO: 637)
CCR5 Q102: 5′-Cy3-GTAGGTAGTTAGGATGAATGGAAGGTTGGTAAAATACAATGTGT

[chemical structure]

(SEQ ID NO: 638)
CCR5 Q186: 5′-Cy3-GTAGGTAGTTAGGATGAATGGAAGGTTGGTATTTTCCATACAGT

[chemical structure]

(SEQ ID NO: 639)

[chemical structure]

[chemical structure]

(SEQ ID NO: 640)
CCR5 W86: 5′-Cy3-

[chemical structure]

[chemical structure]

(SEQ ID NO: 641)
CCR5 Q261: 5′-Cy3-GTAGGTAGTTAGGATGAATGGAAGGTTGGTATCCTGAACACCTT

[chemical structure]

(SEQ ID NO: 642)
APOE4 C11R: 5′-Cy3-GTAGGTAGTTAGGATGAATGGAAGGTTGGTAGACATGGAGGAC

[chemical structure]

(SEQ ID NO: 643)

[chemical structure]

[chemical structure]

(SEQ ID NO: 644)

[chemical structure]

[chemical structure]

(SEQ ID NO: 645)

[chemical structure]

[chemical structure]

(SEQ ID NO: 646)
eGFP M1: 5′-Cy3-GTAGGTAGTTAGGATGAATGGAAGGTTGGTACCTCGCCCTTGCTCA

[chemical structure]

(SEQ ID NO: 647)
eGFP T65A: 5′-Cy3-GTAGGTAGTTAGGATGAATGGAAGGTTGGTACACGCGTAGGCCA 113

[chemical structure]

(SEQ ID NO: 648)
eGFP Y66C: 5′-Cy3-GTAGGTAGTTAGGATGAATGGAAGGTTGGTAAAGCACTGCACTC

[chemical structure]

(SEQ ID NO: 649)

[chemical structure]

[chemical structure]

(SEQ ID NO: 650)

[chemical structure]

[chemical structure]

(SEQ ID NO: 651)
PIK3CA K111E: 5′-Cy3-GTAGGTAGTTAGGATGAATGGAAGGTTGGTATTCTCGATTG

[chemical structure]

(SEQ ID NO: 652)
CTNNB1 T41A: 5′-Cy3-GTAGGTAGTTAGGATGAATGGAAGGTTGGTAAGGAGCTGTGG

[chemical structure]

(SEQ ID NO: 653)

[chemical structure]

[chemical structure]

(SEQ ID NO: 654)

[chemical structure]

[chemical structure]

(SEQ ID NO: 655)

[chemical structure]

[chemical structure]

(SEQ ID NO: 656)

[chemical structure]

[chemical structure]

### Example 3: Uracil Glycosylase Inhibitor Fusion Improves Deamination Efficiency

[0304] Direct programmable nucleobase editing efficiencies in mammalian cells by dCas9:deaminase fusion proteins can be improved significantly by fusing a uracil glycosylase inhibitor (UGI) to the dCas9:deaminase fusion protein.

[0305] FIG. 9 shows in vitro C→T editing efficiencies in human HEK293 cells using rAPOBEC1-XTEN-dCas9:

[chemical structure]

MSSETGPVAVDPTLRRRIEPHEFEVFFDPRELRKETCLLYEINWGGRHSIWRHTSONTNKH
VEVNFIEKFTTERYFCPNTRCSITWFLSWSPCGECSRAITEFLSRYPHVTLFIYIARLYHHAD
PRNRQGLRDLISSGVTIQIMTEQESGYCWRNFVNYSPSNEAHWPRYPHLWVRLYVLELYC

[chemical structure]

[chemical structure]

[chemical structure]

[chemical structure]

[chemical structure]

[chemical structure]

[chemical structure]

[chemical structure]

[chemical structure]

[chemical structure]

[chemical structure]

[chemical structure]

[chemical structure]

[chemical structure]

[chemical structure]

[chemical structure]

[chemical structure]

[chemical structure]

[chemical structure]

[chemical structure]

[chemical structure]

[chemical structure]

[chemical structure]

[chemical structure]

Protospacer sequences were as follows:

(SEQ ID NO: 293)
EMX1: 5′-GAGTC5C6GAGC10AGAAGAAGAA [chemical structure] -3′
(SEQ ID NO: 294)
FANCF: 5′-GGAATC6C7C8TTC11TGCAGCACC [chemical structure] -3′
(SEQ ID NO: 295)
HEK293 site 2: 5′-GAAC4AC6AAAGC11ATAGACTGC [chemical structure] -3′
(SEQ ID NO: 296)
HEK293 site 3: 5′-GGC3C4C5AGAC9TGAGCACGTGA [chemical structure] -3′
(SEQ ID NO: 297)
HEK293 site 4: 5′-GGC3AC5TGC8GGC11TGGAGGTGG [chemical structure] -3′
(SEQ ID NO: 298)
RNF2: 5′-GTC3ATC6TTAGTCATTACCTG [chemical structure] -3′
*PAMs are boxed, C residues within target window (positions 3-11) are
numbered and bolded.

[0306] FIG. 10 demonstrates that C→T editing efficiencies on the same protospacer sequences in HEK293T cells are greatly enhanced when a UGI domain is fused to the rAPOBEC1:dCas9 fusion protein.

rAPOBEC1-XTEN- [chemical structure] -UGI-NLS primary sequence
(SEQ ID NO: 658)
MSSETGPVAVDPTLRRRIEPHEFEVFFDPRELRKETCLLYEINWGGRHSIWRHTSONTNKH
VEVNFIEKFTTERYFCPNTRCSITWFLSWSPCGECSRAITEFLSRYPHVTLFIYIARLYHHAD
PRNRQGLRDLISSGVTIQIMTEQESGYCWRNFVNYSPSNEAHWPRYPHLWVRLYVLELYC

[chemical structure]

[chemical structure]

[chemical structure]

[chemical structure]

[chemical structure]

[chemical structure]

[chemical structure]

[chemical structure]

[chemical structure]

[chemical structure]

[chemical structure]

[chemical structure]

[chemical structure]

[chemical structure]

[chemical structure]

[chemical structure]

[chemical structure]

[chemical structure]

[chemical structure]

[chemical structure]

[chemical structure]

[chemical structure]

[chemical structure]

[chemical structure]

MLPEEVEEVIGNKPESDILVHTAYDESTDENVMLLTSDAPEYKPWALVIODSNGENKI
KMLSGGSPKKKRKV

[0307] The percentages in FIGS. 9 and 10 are shown from sequencing both strands of the target sequence. Because only one of the strands is a substrate for deamination, the maximum possible deamination value in this assay is 50%. Accordingly, the deamination efficiency is double the percentages shown in the tables. E.g., a value of 50% relates to deamination of 100% of double-stranded target sequences.

When a uracil glycosylase inhibitor (UGI) was fused to the dCas9:deaminase fusion protein (e.g., rAPOBEC1-XTEN-dCas9-[UGI]-NLS), a significant increase in editing efficiency in cells was observed. This result indicates that in mammalian cells, the DNA repair machinery that cuts out the uracil base in a U:G base pair is a rate-limiting process in DNA editing. Tethering UGI to the dVas9:deaminase fusion proteins greatly increases editing yields.

[0308] Without UGI, typical editing efficiencies in human cells were in the ˜2-14% yield range (FIG. 9 and FIG. 10, “XTEN” entries). With UGI (FIG. 10, “UGI” entries) the editing was observed in the ˜6-40% range. Using a UGI fusion is thus more efficient than the current alternative method of correcting point mutations via HDR, which also creates an excess of indels in addition to correcting the point mutation. No indels resulting from treatment with the cas9:deaminase:UGI fusions were observed.

### Example 4: Direct, Programmable Conversion of a Target Nucleotide in Genomic DNA without Double-Stranded DNA Cleavage

[0309] Current genome-editing technologies introduce double-stranded DNA breaks at a target locus of interest as the first step to gene correction.^{39,40} Although most genetic diseases arise from mutation of a single nucleobase to a different nucleobase, current approaches to revert such changes are very inefficient and typically induce an abundance of random insertions and deletions (indels) at the target locus as a consequence of the cellular response to double-stranded DNA breaks.^{39,40} Reported herein is the development of nucleobase editing, a new strategy for genome editing that enables the direct conversion of one target nucleobase into another in a programmable manner, without requiring double-stranded DNA backbone cleavage. Fusions of CRISPR/Cas9 were engineered and the cytidine deaminase enzyme APOBEC1 that retain the ability to be programmed with a guide RNA, do not induce double-stranded DNA breaks, and mediate the direct conversion of cytidine to uracil, thereby effecting a C→T (or G→A) substitution following DNA replication, DNA repair, or transcription if the template strand is targeted. The resulting “nucleobase editors” convert cytidines within a window of approximately five nucleotides, and can efficiently correct a variety of point mutations relevant to human disease in vitro. In four transformed human and murine cell lines, second- and third-generation nucleobase editors that fuse uracil glycosylase inhibitor (UGI), and that use a Cas9 nickase targeting the non-edited strand, respectively, can overcome the cellular DNA repair response to nucleobase editing, resulting in permanent correction of up to 37% or (˜15-75%) of total cellular DNA in human cells with minimal (typically <1%) indel formation. In contrast, canonical Cas9-mediated HDR on the same targets yielded an average of 0.7% correction with 4% indel formation. Nucleobase editors were used to revert two oncogenic p53 mutations into wild-type alleles in human breast cancer and lymphoma cells, and to convert an Alzheimer's Disease associated Arg codon in ApoE4 into a non-disease-associated Cys codon in mouse astrocytes. Base editing expands the scope and efficiency of genome editing of point mutations.

[0310] The clustered regularly interspaced short palindromic repeat (CRISPR) system is a prokaryotic adaptive immune system that has been adapted to mediate genome engineering in a variety of organisms and cell lines.⁴¹ CRISPR/Cas9 protein-RNA complexes localize to a target DNA sequence through base pairing with a guide RNA, and natively create a DNA double-stranded break (DSB) at the locus specified by the guide RNA. In response to DSBs, endogenous DNA repair processes mostly result in random insertions or deletions (indels) at the site of DNA cleavage through non-homologous end joining (NHEJ). In the presence of a homologous DNA template, the DNA surrounding the cleavage site can be replaced through homology-directed repair (HDR). When simple disruption of a disease-associated gene is sufficient (for example, to treat some gain-of-function diseases), targeted DNA cleavage followed by indel formation can be effective. For most known genetic diseases, however, correction of a point mutation in the target locus, rather than stochastic disruption of the gene, is needed to address or study the underlying cause of the disease.⁶⁸

[0311] Motivated by this need, researchers have invested intense effort to increase the efficiency of HDR and suppress NHEJ. For example, a small-molecule inhibitor of ligase IV, an essential enzyme in the NHEJ pathway, has been shown to increase HDR efficiency.^{42,43} However, this strategy is challenging in post-mitotic cells, which typically down-regulate HDR, and its therapeutic relevance is limited by the potential risks of inhibiting ligase IV in non-target cells. Enhanced HDR efficiency can also be achieved by the timed delivery of Cas9-guide RNA complexes into chemically synchronized cells, as HDR efficiency is highly cell-cycle dependent.⁴⁴ Such an approach, however, is limited to research applications in cell culture since synchronizing cells is highly disruptive. Despite these developments, current strategies to replace point mutations using HDR in most contexts are very inefficient (typically ˜0.1 to 5%),^{42,43,45,46, 75} especially in unmodified, non-dividing cells. In addition, HDR competes with NHEJ during the resolution of double-stranded breaks, and indels are generally more abundant outcomes than gene replacement. These observations highlight the need to develop alternative approaches to install specific modifications in genomic DNA that do not rely on creating double-stranded DNA breaks. A small-molecule inhibitor of ligase IV, an essential enzyme in the NHEJ pathway, has been shown to increase HDR efficiency.^{42,43} However, this strategy is challenging in post-mitotic cells, which typically down-regulate HDR, and its therapeutic relevance is limited by the potential risks of inhibiting ligase IV in non-target cells. Enhanced HDR efficiency can also be achieved by the timed delivery of Cas9-guide RNA complexes into chemically synchronized cells, as HDR efficiency is highly cell-cycle dependent.⁴⁴ Such an approach, however, is limited to research applications in cell culture since synchronizing cells is highly disruptive. In some cases, it is possible to design HDR templates such that the product of successful HDR contains mutations in the PAM sequence and therefore is no longer a substrate for subsequent Cas9 modification, increasing the overall yield of HDR products,⁷⁵ although such an approach imposes constraints on the product sequences. Recently, this strategy has been coupled to the use of ssDNA donors that are complementary to the non-target strand and high-efficiency ribonucleoprotein (RNP) delivery to substantially increase the efficiency of HDR, but even in these cases the ratio of HDR to NHEJ outcomes is relatively low (<2).⁸³

[0312] It was envisioned that direct catalysis of the conversion of one nucleobase to another at a programmable target locus without requiring DNA backbone cleavage could increase the efficiency of gene correction relative to HDR without introducing undesired random indels at the locus of interest. Catalytically dead Cas9 (dCas9), which contains Asp10A1a and His840Ala mutations that inactivate its nuclease activity, retains its ability to bind DNA in a guide RNA-programmed manner but does not cleave the DNA backbone.^{16,47} In principle, conjugation of dCas9 with an enzymatic or chemical catalyst that mediates the direct conversion of one nucleobase to another could enable RNA-programmed nucleobase editing. The deamination of cytosine (C) is catalyzed by cytidine deaminases²⁹ and results in uracil (U), which has the base pairing properties of thymine (T). dCas9 was fused to cytidine deaminase enzymes in order to test their ability to convert C to U at a guide RNA-specified DNA locus. Most known cytidine deaminases operate on RNA, and the few examples that are known to accept DNA require single-stranded DNA.⁴⁸ Recent studies on the dCas9-target DNA complex reveal that at least nine nucleotides of the displaced DNA strand are unpaired upon formation of the Cas9:guide RNA:DNA “R-loop” complex.¹² Indeed, in the structure of the Cas9 R-loop complex the first 11 nucleotides of the protospacer on the displaced DNA strand are disordered, suggesting that their movement is not highly restricted.⁷⁶ It has also been speculated that Cas9 nickase-induced mutations at cytosines in the non-template strand might arise from their accessibility by cellular cytidine deaminase enzymes.⁷⁷ Recent studies on the dCas9-target DNA complex have revealed that at least 26 bases on the non-template strand are unpaired when Cas9 binds to its target DNA sequence.⁴⁹ It was reasoned that a subset of this stretch of single-stranded DNA in the R-loop might serve as a substrate for a dCas9-tethered cytidine deaminase to effect direct, programmable conversion of C to U in DNA (FIG. 11A).

[0313] Four different cytidine deaminase enzymes (hAID, hAPOBEC3G, rAPOBEC1, and pmCDA1) were expressed in a mammalian cell lysate-derived in vitro transcription-translation system and evaluated for ssDNA deamination. Of the four enzymes, rAPOBEC1 showed the highest deaminase activity under the tested conditions and was chosen for dCas9 fusion experiments (FIG. 36A). Although appending rAPOBEC1 to the C-terminus of dCas9 abolishes deaminase activity, fusion to the N-terminus of dCas9 preserves deaminase activity on ssDNA at a level comparable to that of the unfused enzyme. Four rAPOBEC1-dCas9 fusions were expressed and purified with linkers of different length and composition (FIG. 36B), and evaluated each fusion for single guide RNA (sgRNA)-programmed dsDNA deamination in vitro (FIGS. 11A to 11C and FIGS. 15A to 15D).

[0314] Efficient, sequence-specific, sgRNA-dependent C to U conversion was observed in vitro (FIGS. 11A to 11C). Conversion efficiency was greatest using rAPOBEC1-dCas9 linkers over nine amino acids in length. The number of positions susceptible to deamination (the deamination “activity window”) increases with linker length was extended from three to 21 amino acids (FIGS. 36C to 36F15A to 15D). The 16-residue XTEN linker⁵⁰ was found to offer a promising balance between these two characteristics, with an efficient deamination window of approximately five nucleotides, from positions 4 to 8 within the protospacer, counting the end distal to the protospacer-adjacent motif (PAM) as position 1. The rAPOBEC1-XTEN-dCas9 protein served as the first-generation nucleobase editor (NBE1).

[0315] Elected were seven mutations relevant to human disease that in theory could be corrected by C to T nucleobase editing, synthesized double-stranded DNA 80-mers of the corresponding sequences, and assessed the ability of NBE1 to correct these mutations in vitro (FIGS. 16A to 16B). NBE1 yielded products consistent with efficient editing of the target C, or of at least one C within the activity window when multiple Cs were present, in six of these seven targets in vitro, with an average apparent editing efficiency of 44% (FIGS. 16A to 16B). In the three cases in which multiple Cs were present within the deamination window, evidence of deamination of some or all of these cytosines was observed. In only one of the seven cases tested were substantial yields of edited product observed (FIGS. 16A to 16B).

Although the preferred sequence context for APOBEC1 substrates is reported to be CC or TC,⁵¹ it was anticipated that the increased effective molarity of the deaminase and its single-stranded DNA substrate mediated by dCas9 binding to the target locus may relax this restriction. To illuminate the sequence context generality of NBE1, its ability to edit a 60-mer double-stranded DNA oligonucleotide containing a single fixed C at position 7 within the protospacer was assayed, as well as all 36 singly mutated variants in which protospacer bases 1-6 and 8-13 were individually varied to each of the other three bases. Each of these 37 sequences were treated with 1.9 μM NBE1, 1.9 μM of the corresponding sgRNA, and 125 nM DNA for 2 h, similar to standard conditions for in vitro Cas9 assays⁵². High-throughput DNA sequencing (HTS) revealed 50 to 80% C to U conversion of targeted strands (25 to 40% of total sequence reads arising from both DNA strands, one of which is not a substrate for NBE1) (FIG. 12A). The nucleotides surrounding the target C had little effect on editing efficiency was independent of sequence context unless the base immediately 5′ of the target C is a G, in which case editing efficiency was substantially lower (FIGS. 12A to 12B). NBE1 activity in vitro was assessed on all four NC motifs at positions 1 through 8 within the protospacer (FIGS. 12A to 12B). In general NBE1 activity on substrates was observed to follow the order TC≥CC≥AC≥GC, with maximum editing efficiency achieved when the target C is at or near position 7. In addition, it was observed that the nucleobase editor is highly processive, and will efficiently convert most of all Cs to Us on the same DNA strand within the 5-base activity window (FIG. 17).

[0316] While BE1 efficiently processes substrates in a test tube, in cells a tree of possible DNA repair outcomes determines the fate of the initial U:G product of base editing (FIG. 29A). To test the effectiveness of nucleobase editing in human cells, NBE1 codon usage was optimized for mammalian expression, appended a C-terminal nuclear localization sequence (NLS),⁵³ and assayed its ability to convert C to T in human cells on 14Cs in six well-studied target sites throughout the human genome (FIG. 37A).⁵⁴ The editable Cs were confirmed within each protospacer in vitro by incubating NBE1 with synthetic 80-mers that correspond to the six different genomic sites, followed by HTS (FIGS. 13A to 13C, FIG. 29B and FIG. 25). Next, HEK293T cells were transfected with plasmids encoding NBE1 and one of the six target sgRNAs, allowed three days for nucleobase editing to occur, extracted genomic DNA from the cells, and analyzed the loci by HTS. Although C to T editing in cells at the target locus was observed for all six cases, the efficiency of nucleobase editing was 1.1% to 6.3% or 0.8%-7.7% of total DNA sequences (corresponding to 2.2% to 12.6% of targeted strands), a 6.3-fold to 37-fold or 5-fold to 36-fold decrease in efficiency compared to that of in vitro nucleobase editing (FIGS. 13A to 13C, FIG. 29B and FIG. 25). It was observed that some base editing outside of the typical window of positions 4 to 8 when the substrate C is preceded by a T, which we attribute to the unusually high activity of APOBEC1 for TC substrates.⁴⁸

[0317] It was asked whether the cellular DNA repair response to the presence of U:G heteroduplex DNA was responsible for the large decrease in nucleobase editing efficiency in cells (FIG. 29A). Uracil DNA glycosylase (UDG) catalyzes removal of U from DNA in cells and initiates base excision repair (BER), with reversion of the U:G pair to a C:G pair as the most common outcome (FIG. 29A).⁵⁵ Uracil DNA glycosylase inhibitor (UGI), an 83-residue protein from B. subtilis bacteriophage PBS1, potently blocks human UDG activity (IC₅₀=12 μM).⁵⁶ UGI was fused to the C-terminus of NBE1 to create the second-generation nucleobase editor NBE2 and repeated editing assays on all six genomic loci. Editing efficiencies in human cells were on average 3-fold higher with NBE2 than with NBE1, resulting in gene conversion efficiencies of up to 22.8% of total DNA sequenced (up to 45.6% of targeted strands) (FIGS. 13A to 13C and FIG. 29B). To test base editing in human cells, BE1 codon usage was optimized for mammalian expression and appended a C-terminal nuclear localization sequence (NLS).⁵³

[0318] Similar editing efficiencies were observed when a separate plasmid overexpressing UGI was co-transfected with NBE1 (FIGS. 18A to 18H). However, while the direct fusion of UGI to NBE1 resulted in no significant increase in C to T mutations at monitored non-targeted genomic locations, overexpression of unfused UGI detectably increased the frequency of C to T mutations elsewhere in the genome (FIGS. 18A to 18H). The generality of NBE2-mediated nucleobase editing was confirmed by assessing editing efficiencies on the same six genomic targets in U2OS cells, and observed similar results with those in HEK293T cells (FIG. 19). Importantly, NBE2 typically did not result in any detectable indels (FIG. 13C and FIG. 29C), consistent with the known mechanistic dependence of NHEJ on double-stranded DNA breaks.^{57,78} Together, these results indicate that conjugating UGI to NBE1 can greatly increase the efficiency of nucleobase editing in human cells.

[0319] The permanence of nucleobase editing in human cells was confirmed by monitoring editing efficiencies over multiple cell divisions in HEK293T cells at two of the tested genomic loci. Genomic DNA was harvested at two time points: three days after transfection with plasmids expressing NBE2 and appropriate sgRNAs, and after passaging the cells and growing them for four additional days (approximately five subsequent cell divisions). No significant change in editing efficiency was observed between the non-passaged cells (editing observed in 4.6% to 6.6% of targeted strands for three different target Cs) and passaged cells (editing observed in 4.6% to 6.4% of targeted strands for the same three target Cs), confirming that the nucleobase edits became permanent following cell division (FIG. 20). Indels will on rare occasion arise from the processing of U:G lesions by cellular repair processes, which involve single-strand break intermediates that are known to lead to indels.⁸⁴ Given that several hundred endogenous U:G lesions are generated every day per human cell from spontaneous cytidine deaminase,⁸⁵ it was anticipate that the total indel frequency from U:G lesion repair is unlikely to increase from BE1 or BE2 activity at a single target locus.

[0320] To further increase the efficiency of nucleobase editing in cells, it was anticipated that nicking the non-edited strand may result in a smaller fraction of edited Us being removed by the cell, since eukaryotic mismatch repair machinery uses strand discontinuity to direct DNA repair to any broken strand of a mismatched duplex (FIG. 29A).⁵⁸⁻⁷⁹⁻⁸⁰ The catalytic His residue was restored at position 840 in the Cas9 HNH domain,^{47,59} resulting in the third-generation nucleobase editor NBE3 that nicks the non-edited strand containing a G opposite the targeted C, but does not cleave the target strand containing the C. Because NBE3 still contains the Asp10A1a mutation in Cas9, it does not induce double-stranded DNA cleavage. This strategy of nicking the non-edited strand augmented nucleobase editing efficiency in human cells by an additional 1.4- to 4.8-fold relative to NBE2, resulting in up to 36.3% of total DNA sequences containing the targeted C to T conversion on the same six human genomic targets in HEK293T cells (FIGS. 13A to 13C and FIG. 29B). Importantly, only a small frequency of indels, averaging 0.8% (ranging from 0.2% to 1.6% for the six different loci), was observed from NBE3 treatment (FIG. 13C, FIG. 29C, and FIG. 34). In contrast, when cells were treated with wild-type Cas9, sgRNA, and a single-stranded DNA donor template to mediate HDR at three of these loci C to T conversion efficiencies averaging only 0.7% were observed, with much higher relative indel formation averaging 3.9% (FIGS. 13A to 13C and FIG. 29C). The ratio of allele conversion to NHEJ outcomes averaged>1,000 for BE2, 23 for BE3, and 0.17 for wild-type Cas9 (FIG. 3c). We confirmed the permanence of base editing in human cells by monitoring editing efficiencies over multiple cell divisions in HEK293T cells at the HEK293 site 3 and 4 genomic loci (FIG. 38). These results collectively establish that nucleobase editing can effect much more efficient targeted single-base editing in human cells than Cas9-mediated HDR, and with much less (NBE3) or no (NBE2) indel formation.

[0321] Next, the off-target activity of NBE1, NBE2, and NBE3 in human cells was evaluated. The off-target activities of Cas9, dCas9, and Cas9 nickase have been extensively studied (FIGS. 23 to 24 and 31 to 33).^{54,60-62} Because the sequence preference of rAPOBEC1 has been shown to be independent of DNA bases more than one base from the target C,⁶³ consistent with the sequence context independence observed in FIGS. 12A to 12B, it was assumed that potential off-target activity of nucleobase editors arises from off-target Cas9 binding. Since only a fraction of Cas9 off-target sites will have a C within the active window for nucleobase editing, off-target nucleobase editing sites should be a subset of the off-target sites of canonical Cas9 variants. For each of the six sites studied, the top ten known Cas9 off-target loci in human cells that were previously determined using the GUIDE-seq method were sequenced (FIGS. 23 to 27 and 31 to 33).⁵⁴⁻⁶¹ Detectable off-target nucleobase editing at only a subset (16/34, 47% for NBE1 and NBE2, and 17/34, 50% for NBE3) of known dCas9 off-target loci was observed. In all cases, the off-target base-editing substrates contained a C within the five-base target window. In general, off-target C to T conversion paralleled off-target Cas9 nuclease-mediated genome modification frequencies (FIGS. 23 to 27). Also monitored were C to T conversions at 2,500 distinct cytosines surrounding the six on-target and 34 off-target loci tested, representing a total of 14,700,000 sequence reads derived from approximately 1.8×10⁶ cells, and observed no detectable increase in C to T conversions at any of these other sites upon NBE1, NBE2, or NBE3 treatment compared to that of untreated cells (FIG. 28). Taken together, these findings suggest that off-target substrates of nucleobase editors include a subset of Cas9 off-target substrates, and that nucleobase editors in human cells do not induce untargeted C to T conversion throughout the genome at levels that can be detected by the methods used here. No substantial change was observed in editing efficiency between non-passaged HEK293T cells (editing observed in 1.8% to 2.6% of sequenced strands for the three target Cs with BE2, and 6.2% to 14.3% with BE3) and cells that had undergone approximately five cell divisions after base editing (editing observed in 1.9% to 2.3% of sequenced strands for the same target Cs with BE2, and 6.4% to 14.5% with BE3), confirming that base edits in these cells are durable (Extended Data FIG. 6).

[0322] Finally, the potential of nucleobase editing to correct three disease-relevant mutations in mammalian cells was tested. The apolipoprotein E gene variant APOE4 encodes two Arg residues at amino acid positions 112 and 158, and is the largest and most common genetic risk factor for late-onset Alzheimer's disease.⁶⁴ ApoE variants with Cys residues in positions 112 or 158, including APOE2 (Cys112/Cys158), APOE3 (Cys112/Arg158), and APOE3′ (Arg112/Cys158) have been shown⁶⁵ or are presumed⁸¹ to confer substantially lower Alzheimer's disease risk than APOE4. Encouraged by the ability of NBE1 to convert APOE4 to APOE3′ in vitro (FIGS. 16A to 16B), this conversion was attempted in immortalized mouse astrocytes in which the endogenous murine APOE gene has been replaced by human APOE4 (Taconic). DNA encoding NBE3 and an appropriate sgRNA was delivered into these astrocytes by nucleofection (nucleofection efficiency of 25%), extracted genomic DNA from all treated cells two days later, and measured editing efficiency by HTS. Conversion of Arg158 to Cys158 was observed in 58-75% of total DNA sequencing reads (44% of nucleofected astrocytes) (FIGS. 14A to 14C and FIG. 30A). Also observed was 36-50% editing of total DNA at the third position of codon 158 and 38-55% editing of total DNA at the first position of Leu159, as expected since all three of these Cs are within the active nucleobase editing window. However, neither of the other two C→T conversions results in a change in the amino acid sequence of the ApoE3′ protein since both TGC and TGT encode Cys, and both CTG and TTG encode Leu. From >1,500,000 sequencing reads derived from 1×10⁶ cells evidence of 1.7% indels at the targeted locus following NBE3 treatment was observed (FIG. 35). In contrast, identical treatment of astrocytes with wt Cas9 and donor ssDNA resulted in 0.1-0.3% APOE4 correction and 26-40% indels at the targeted locus, efficiencies consistent with previous reports of single-base correction using Cas9 and HDR^{45,75} (FIG. 30A and FIG. 40A). Astrocytes treated identically but with an sgRNA targeting the VEGFA locus displayed no evidence of APOE4 base editing (FIG. 34 and FIG. 40A). These results demonstrate how nucleobase editors can effect precise, single-amino acid changes in the coding sequence of a protein as the major product of editing, even when their processivity results in more than one nucleotide change in genomic DNA. The off-target activities of Cas9, dCas9, and Cas9 nickase have been extensively studied.^{54,60-62} In general, off-target C to T conversions by BE1, BE2, and BE3 paralleled off-target Cas9 nuclease-mediated genome modification frequencies.

[0323] The dominant-negative p53 mutations Tyr163Cys and Asn239Asp are strongly associated with several types of cancer.⁶⁶⁻⁶⁷ Both of these mutations can be corrected by a C to T conversion on the template strand (FIGS. 16A to 16B). A human breast cancer cell line homozygous for the p53 Tyr163Cys mutation (HCC1954 cells) was nucleofected with DNA encoding NBE3 and an sgRNA programmed to correct Tyr163Cys. Because the nucleofection efficiency of HCC1954 cells was <10%, a plasmid expressing IRFP was co-nucleofected into these cells to enable isolation of nucleofected cells by fluorescence-activated cell sorting two days after treatment. HTS of genomic DNA revealed correction of the Tyr163Cys mutation in 7.6% of nucleofected HCC1954 cells (FIG. 30B and FIG. 40A to 40B). Also nucleofected was a human lymphoma cell line that is heterozygous for p53 Asn239Asp (ST486 cells) with DNA encoding NBE2 and an sgRNA programmed to correct Asn239Asp with 92% nucleofection efficiency). Correction of the Asn239Asp mutation was observed in 11% of treated ST486 cells (12% of nucleofected ST486 cells). Consistent with the findings in HEK cells, no indels were observed from the treatment of ST486 cells with NBE2, and 0.6% indel formation from the treatment of HCC1954 cells with NBE3. No other DNA changes within at least 50 base pairs of both sides of the protospacer were detected at frequencies above that of untreated controls out of >2,000,000 sequencing reads derived from 2×10⁵ cells (FIGS. 14A to 14C, FIG. 30B and Table 1). These results collectively represent the conversion of three disease-associated alleles in genomic DNA into their wild-type forms with an efficiency and lack of other genome modification events that is, to our knowledge, not currently achievable using other methods.

[0324] To illuminate the potential relevance of nucleobase editors to address human genetic diseases, the NCBI ClinVar database⁶⁸ was searched for known genetic diseases that could in principle be corrected by this approach. ClinVar was filtered by first examining only single nucleotide polymorphisms (SNPs), then removing any nonpathogenic variants. Out of the 24,670 pathogenic SNPs, 3,956 are caused by either a T to C, or an A to G, substitution. This list was further filtered to only include variants with a nearby NGG PAM that would position the SNP within the deamination activity window, resulting in 1,089 clinically relevant pathogenic gene variants that could in principle be corrected by the nucleobase editors described here (FIG. 21 and Table 1). To illuminate the potential relevance of base editors to address human genetic diseases, the NCBI ClinVar database⁶⁸ was searched for known genetic diseases that could in principle be corrected by this approach. ClinVar was filtered by first examining only single nucleotide polymorphisms (SNPs), then removing any non-pathogenic variants. Out of the 24,670 pathogenic SNPs, 3,956 are caused by either a T to C, or an A to G, substitution. This list was further filtered to only include variants with a nearby NGG PAM that would position the SNP within the deamination activity window, resulting in 911 clinically relevant pathogenic gene variants that could in principle be corrected by the base editors described here. Of these, 284 contain only one C within the base editing activity window. A detailed list of these pathogenic mutations can be found in Table 1.

TABLE 1
List of 911 base-editable gene variants associated with human disease with an
NGG PAM (SEQ ID NOs: 747 to 1868 appear from top to bottom below, respectively). The “Y”
in the protospacer and PAM sequences indicates the base to be edited, e.g., C.
(SEQ ID NOs: 747 to 1868 appear from top to bottom below, respectively)

| | | Protospacer and | |
|---|---|---|---|
| dbSNP # | Genotype | PAM sequence(s) | Associated genetic disease |
| 755445790 | NM_000391.3(TPP1): | TTTYTTTTTTTTTTTTTTTGAGG | Ceroid lipofuscinosis, |
| | c.887 − 10A > G | | neuronal, 2 |
| 113994167 | NM_000018.3(ACADVL): | TTTGYGGTGGAGAGGGGCTTCGG, | Very long chain acyl-CoA |
| | c.848T > C (p.Val283Ala) | TTGYGGTGGAGAGGGGCTTCGGG | dehydrogenase deficiency |
| 119470018 | NM_024996.5(GFM1): | TTGYTAATAAAAGTTAGAAACGG | Combined oxidative |
| | c.521A > G (p.Asn174Ser) | | phosphorylation deficiency 1 |
| 115650537 | NM_000426.3(LAMA2): | TTGAYAGGGAGCAAGCAGTTCGG, | Merosin deficient congenital |
| | c.8282T > C (p.Ile2761Thr) | TGAYAGGGAGCAAGCAGTTCGGG | muscular dystrophy |
| 587777752 | NM_014946.3(SPAST): | TTCYGTAAAACATAAAAGTCAGG | Spastic paraplegia 4, |
| | c.1688 − 2A > G | | autosomal dominant |
| 794726821 | NM_001165963.1(SCN1A): | TTCYGGTTTGTCTTATATTCTGG | Severe myoclonic epilepsy in |
| | c.4055T > C (p.Leu1352Pro) | | infancy |
| 397514745 | NM_001130089.1(KARS): | CTTCYATGATCTTCGAGGAGAGG, | Deafness, autosomal recessive |
| | c.517T > C (p.Tyr173His) | TTCYATGATCTTCGAGGAGAGGG | 89 |
| 376960358 | NM_001202.3(BMP4): | TTCGTGGYGGAAGCTCCTCACGG | Microphthalmia syndromic 6 |
| | c.362A > G (p.His121Arg) | | |
| 606231280 | NM_001287223.1(SCN11A): | CTTCAYTGTGGTCATTTTCCTGG, | Episodic pain syndrome, |
| | c.1142T > C (p.Ile381Thr) | TTCAYTGTGGTCATTTTCCTGGG | familial, 3 |
| 387906735 | m.608A > G | TTCAGYGTATTGCTTTGAGGAGG | |
| 199474663 | m.3260A > G | TTAAGTTYTATGCGATTACCGGG | Cardiomyopathy with or |
| | | | without skeletal myopathy |
| 104894962 | NM_003413.3(ZIC3): | TGTGTTYGCGCAGGGAGCTCGGG, | Heterotaxy, visceral, X-linked |
| | c.1213A > G (p.Lys405Glu) | ATGTGTTYGCGCAGGGAGCTCGG | |
| 796053181 | NM_021007.2(SCN2A): | TGTGGYGGCCATGGCCTATGAGG | not provided |
| | c.1271T > C (p.Val424Ala) | | |
| 267606788 | NM_000129.3(F13A1): | TGTGAYGGACAGAGCACAAATGG | Factor xiii, a subunit, |
| | c.728T > C (p.Met243Thr) | | deficiency of |
| 397514503 | NM_003863.3(DPM2): | TGTAGYAGGTGAAGATGATCAGG | Congenital disorder of |
| | c.68A > G (p.Tyr23Cys) | | glycosylation type 1u |
| 104893973 | NM_000416.2(IFNGR1): | TGTAATAYTTCTGATCATGTTGG | Disseminated atypical |
| | c.260T > C (p.Ile87Thr) | | mycobacterial infection, |
| | | | Mycobacterium tuberculosis, |
| | | | susceptibility to |
| 121908466 | NM_005682.6(ADGRG1): | TGGYAGAGGCCCCTGGGGTCAGG | Polymicrogyria, bilateral |
| | c.263A > G (p.Tyr88Cys) | | frontoparietal |
| 147952488 | NM_002437.4(MPV17): | TGGYAAGTTCTCCCCTCAACAGG | Navajo neurohepatopathy |
| | c.186 + 2T > C | | |
| 121909537 | NM_001145.4(ANG): | TGGTTYGGCATCATAGTGCTGGG, | Amyotrophic lateral sclerosis |
| | c.121A > G (p.Lys41Glu) | GTGGTTYGGCATCATAGTGCTGG | type 9 |
| 121918489 | NM_000141.4(FGFR2): | TGGGGAAYATACGTGCTTGGCGG, | Crouzon syndrome |
| | c.1018T > C (p.Tyr340His) | GGGGAAYATACGTGCTTGGCGGG | |
| 121434463 | m.12320A > G | GAGTYGCACCAAAATTTTTGGGG, | Mitochondrial myopathy |
| | | GGAGTYGCACCAAAATTTTTGGG, | |
| | | TGGAGTYGCACCAAAATTTTTGG | |
| 121908046 | NM_000403.3(GALE): | TGGAAGYTATCGATGACCACAGG | UDPglucose-4-epimerase |
| | c.101A > G (p.Asn34Ser) | | deficiency |
| 431905512 | NM_003764.3(STX11): | TGCYGGTGGCCGACGTGAAGCGG | Hemophagocytic |
| | c.173T > C (p.Leu58Pro) | | lymphohistiocytosis, familial, |
| | | | 4 |
| 121917905 | NM_000124.3(ERCC6): | TGCYAAAAGACCCAAAACAAAGG | Cerebro-oculo-facio-skeletal |
| | c.2960T > C (p.Leu987Pro) | | syndrome |
| 121918500 | NM_000141.4(FGFR2): | TGCTYGATCCACTGGATGTGGGG, | Crouzon syndrome |
| | c.874A > G (p.Lys292Glu) | GTGCTYGATCCACTGGATGTGGG, | |
| | | CGTGCTYGATCCACTGGATGTGG | |
| 60431989 | NM_000053.3(ATP7B): | TGCTGAYTGGAAACCGTGAGTGG | Wilson disease |
| | c.3443T > C (p.Ile1148Thr) | | |
| 78950939 | NM_000250.1(MPO): | GTGCGGYATTTGTCCTGCTCCGG, | Myeloperoxidase deficiency |
| | c.518A > G (p.Tyr173Cys) | TGCGGYATTTGTCCTGCTCCGGG | |
| 115677373 | NM_201631.3(TGM5): | TGCGGAGYGGACGGGCAGCGTGG | Peeling skin syndrome, acral |
| | c.763T > C (p.Trp255Arg) | | type |
| 5030804 | NM_000551.3(VHL): | GCGAYTGCAGAAGATGACCTGGG, | Von Hippel-Lindau syndrome |
| | c.233A > G (p.Asn78Ser) | TGCGAYTGCAGAAGATGACCTGG | |
| 397508328 | NM_000492.3(CFTR): | GCAYGGTCTCTCGGGCGCTGGGG, | Cystic fibrosis |
| | c.1A > G (p.Met1Val) | TGCAYGGTCTCTCGGGCGCTGGG, | |
| | | CTGCAYGGTCTCTCGGGCGCTGG | |
| 137853299 | NM_000362.4(TIMP3): | TGCAGYAGCCGCCCTTCTGCCGG | Sorsby fundus dystrophy |
| | c.572A > G (p.Tyr191Cys) | | |
| 121908549 | NM_000334.4(SCN4A): | TGAYGGAGGGGATGGCGCCTAGG | |
| | c.3478A > G (p.Ile1160Val) | | |
| 121909337 | NM_001451.2(FOXF1): | TGATGYGAGGCTGCCGCCGCAGG | Alveolar capillary dysplasia |
| | c.1138T > C (p.Ter380Arg) | | with misalignment of |
| | | | pulmonary veins |
| 281875320 | NM_005359.5(SMAD4): | TGAGYATGCATAAGCGACGAAGG | Myhre syndrome |
| | c.1500A > G (p.Ile500Met) | | |
| 730880132 | NM_170707.3(LMNA): | TGAGTYTGAGAGCCGGCTGGCGG | Primary dilated |
| | c.710T > C (p.Phe237Ser) | | cardiomyopathy |
| 281875322 | NM_005359.5(SMAD4): | TGAGTAYGCATAAGCGACGAAGG | Hereditary cancer-predisposing |
| | c.1498A > G (p.Ile500Val) | | syndrome, Myhre syndrome |
| 72556283 | NM_000531.5(OTC): | TGAGGYAATCAGCCAGGATCTGG | not provided |
| | c.527A > G (p.Tyr176Cys) | | |
| 74315311 | NM_020435.3(GJC2): | TGAGAYGGCCCACCTGGGCTTGG, | Leukodystrophy, |
| | c.857T > C (p.Met286Thr) | GAGAYGGCCCACCTGGGCTTGGG | hypomyelinating, 2 |
| 121912495 | NM_170707.3(LMNA): | TCTYGGAGGGCGAGGAGGAGAGG | Congenital muscular |
| | c.1139T > C (p.Leu380Ser) | | dystrophy, LMNA-related |
| 128620184 | NM_000061.2(BTK): | TCTYGATGGCCACGTCGTACTGG | X-linked agammaglobulinemia |
| | c.1288A > G (p.Lys430Glu) | | |
| 118192252 | NM_004519.3(KCNQ3): | TCTTTAYTGTTTAAGCCAACAGG | Benign familial neonatal |
| | c.1403A > G (p.Asn468Ser) | | seizures 2, not specified |
| 121909142 | NM_001300.5(KLF6): | TCTGYGGACCAAAATCATTCTGG | |
| | c.190T > C (p.Trp64Arg) | | |
| 104895503 | NM_001127255.1(NLRP7): | TCTGGYTGATACTCAAGTCCAGG | Hydatidiform mole |
| | c.2738A > G (p.Asn913Ser) | | |
| 587783035 | NM_000038.5(APC): | TCCYAGTAAGAAACAGAATATGG | Familial adenomatous |
| | c.1744 − 2A > G | | polyposis 1 |
| 72556289 | NM_000531.5(OTC): | TCCYAAAAGGCACGGGATGAAGG | not provided |
| | c.541 − 2A > G | | |
| 28937313 | NM_005502.3(ABCA1): | TCCAYTGTGGCCCAGGAAGGAGG, | Tangier disease |
| | c.2804A > G (p.Asn935Ser) | CGCTCCAYTGTGGCCCAGGAAGG | |
| 143246552 | NM_001003811.1(TEX11): | TCCAYGGTCAAGTCAGCCTCAGG, | Spermatogenic failure, X- |
| | c.511A > G (p.Met171Val) | CCAYGGTCAAGTCAGCCTCAGGG | linked, 2 |
| 587776451 | NM_002049.3(GATA1): | CTCCAYGGAGTTCCCTGGCCTGG, | GATA-1-related |
| | c.2T > C (p.Met1Thr) | TCCAYGGAGTTCCCTGGCCTGGG, | thrombocytopenia with |
| | | CCAYGGAGTTCCCTGGCCTGGGG | dyserythropoiesis |
| 121908403 | NM_021102.3(SPINT2): | TCCAYAGATGAAGTTATTGCAGG | Diarrhea 3, secretory sodium, |
| | c.488A > G (p.Tyr163Cys) | | congenital, syndromic |
| 281874738 | NM_000495.4(COL4A5): | CTCCAGYAAGTTATAAAATTTGG, | Alport syndrome, X-linked |
| | c.438 + 2T > C | TCCAGYAAGTTATAAAATTTGGG | recessive |
| 730880279 | NM_030653.3(DDX11): | TCCAGGYGCGGGCGTCATGCTGG, | Warsaw breakage syndrome |
| | c.2271 + 2T > C | CCAGGYGCGGGCGTCATGCTGGG | |
| 28940272 | NM_017890.4(VPS13B): | TCAYTGATAAGCAGGGCCCAGGG, | Cohen syndrome, not specified |
| | c.8978A > G (p.Asn2993Ser) | TTCAYTGATAAGCAGGGCCCAGG | |
| 137852375 | NM_000132.3(F8): | TCAYGGTGAGTTAAGGACAGTGG | Hereditary factor VIII |
| | c.5372T > C (p.Met1791Thr) | | deficiency disease |
| 11567847 | NM_021961.5(TEAD1): | TCATATTYACAGGCTTGTAAAGG | |
| | c.1261T > C (p.Tyr?His) | | |
| 786203989 | NM_016069.9(PAM16): | CATAGTYCTGCAGAGGAGAGGGG, | Chondrodysplasia, |
| | c.226A > G (p.Asn76Asp) | TCATAGTYCTGCAGAGGAGAGGG | megarbane-dagher-melki type |
| 587776437 | NC_012920.1:m.9478T > C | TCAGAAGYTTTTTTCTTCGCAGG | Leigh disease |
| 121912474 | NM_000424.3(KRT5): | TCAAGTGYGTCCTTCCGGAGCGG, | Epidermolysis bullosa |
| | c.20T > C (p.Val7Ala) | CAAGTGYGTCCTTCCGGAGCGGG, | simplex, Koebner type |
| | | AAGTGYGTCCTTCCGGAGCGGGG, | |
| | | AGTGYGTCCTTCCGGAGCGGGGG | |
| 104886461 | NM_020533.2(MCOLN1): | AGGTACYGTGGGCAGAGAAGGGG, | Ganglioside sialidase |
| | c.406 − 2A > G | TACYGTGGGCAGAGAAGGGGAGG, | deficiency |
| | | CAGGTACYGTGGGCAGAGAAGGG | |
| 104894275 | NM_000317.2(PTS): | TAAYTGTGCCCATGGCCATTTGG | 6-pyruvoyl-tetrahydropterin |
| | c.155A > G (p.Asn52Ser) | | synthase deficiency |
| 587777562 | NM_015599.2(PGM3): | TAAATGAYTGAGTTTGCCCTTGG | Immunodeficiency 23 |
| | c.737A > G (p.Asn246Ser) | | |
| 121964906 | NM_000027.3(AGA): | GTTATAYGTGCCAATGTGACTGG | Aspartylglycosaminuria |
| | c.916T > C (p.Cys306Arg) | | |
| 28941769 | NM_000356.3(TCOF1): | GTGTGTAYAGATGTCCAGAAGGG | Treacher collins syndrome 1 |
| | c.149A > G (p.Tyr50Cys) | | |
| 121434464 | m.12297T > C | GTCYTAGGCCCCAAAAATTTTGG | Cardiomyopathy, |
| | | | mitochondrial |
| 121908407 | NM_054027.4(ANKH): | GTCGAGAYGCTGGCCAGCTACGG, | Chondrocalcinosis 2 |
| | c.143T > C (p.Met48Thr) | TCGAGAYGCTGGCCAGCTACGGG | |
| 59151893 | NM_000422.2(KRT17): | GTCAYTGAGGTTCTGCATGGTGG, | Pachyonychia congenita type 2 |
| | c.275A > G (p.Asn92Ser) | GCGGTCAYTGAGGTTCTGCATGG | |
| 121909499 | NM_002427.3(MMP13): | GTCAYGAAAAAGCCAAGATGCGG, | |
| | c.272T > C (p.Met91Thr) | TCAYGAAAAAGCCAAGATGCGGG | |
| 61748478 | NM_000552.3(VWF): | GTCAYAGTTCTGGCACGTTTTGG | von Willebrand disease type |
| | c.2384A > G (p.Tyr795Cys) | | 2N |
| 387906889 | NM_006796.2(AFG3L2): | GTAYAGAGGTATTGTTCTTTTGG | Spastic ataxia 5, autosomal |
| | c.1847A > G (p.Tyr616Cys) | | recessive |
| 118203907 | NM_000130.4(F5): | GTAGYAGGCCCAAGCCCGACAGG | Factor V deficiency |
| | c.5189A > G (p.Tyr1730Cys) | | |
| 118203945 | NM_013319.2(UBIAD1): | GTAAGTGYTGACCAAATTACCGG | Schnyder crystalline corneal |
| | c.305A > G (p.Asn102Ser) | | dystrophy |
| 267607080 | NM_005633.3(SOS1): | GGTYGGGAGGGAAAAGACATTGG | Noonan syndrome 4, |
| | c.1294T > C (p.Trp432Arg) | | Rasopathy |
| 137852953 | NM_012464.4(TLL1): | GGTTAYGGTGCCGTTAAGTTTGG | Atrial septal defect 6 |
| | c.1885A > G (p.Ile629Val) | | |
| 118203949 | NM_013319.2(UBIAD1): | GGTGTTGYTGGAATGGAGAATGG | Schnyder crystalline corneal |
| | c.695A > G (p.Asn232Ser) | | dystrophy |
| 137852952 | NM_012464.4(TLL1): | GGGATTGYTGTTCATGAATTGGG | Atrial septal defect 6 |
| | c.713T > C (p.Val238Ala) | | |
| 41460449 | m.3394T > C | GGCYATATACAACTACGCAAAGG | Leber optic atrophy |
| 80357281 | NM_007294.3(BRCA1): | GGGCYAGAAATCTGTTGCTATGG, | Familial cancer of breast, |
| | c.5291T > C (p.Leu1764Pro) | GGCYAGAAATCTGTTGCTATGGG | Breast-ovarian cancer, familial |
| | | | 1 |
| 5030764 | NM_000174.4(GP9): | GGCTGYTGTTGGCCAGCAGAAGG | Bernard-Soulier syndrome |
| | c.182A > G (p.Asn61Ser) | | type C |
| 72556282 | NM_000531.5(OTC): | GGCTGATYACCTCACGCTCCAGG, | not provided |
| | c.526T > C (p.Tyr176His) | GATYACCTCACGCTCCAGGTTGG | |
| 121913594 | NM_000530.6(MPZ): | GGCATAGYGGAAGATCTATGAGG | Charcot-Marie-Tooth disease |
| | c.242A > G (p.His81Arg) | | type 1B |
| 587777736 | NM_017617.3(NOTCH1): | GGCAAGYGCATCAACACGCTGGG, | Adams-Oliver syndrome 1, |
| | c.1285T > C (p.Cys429Arg) | GGGCAAGYGCATCAACACGCTGG | Adams-Oliver syndrome 5 |
| 63750912 | NM_016835.4(MAPT): | GGATAAYATCAAACACGTCCCGG, | Frontotemporal dementia |
| | c.1839T > C (p.Asn613=) | GATAAYATCAAACACGTCCCGGG | |
| 121918075 | NM_000371.3(TTR): | GGAGYAGGGGCTCAGCAGGGCGG, | Amyloidogenic transthyretin |
| | c.401A > G (p.Tyr134Cys) | ATAGGAGYAGGGGCTCAGCAGGG | amyloidosis |
| 730882063 | NM_004523.3(KIF11): | GGAGGYAATAACTTTGTAAGTGG | Microcephaly with or without |
| | c.2547 + 2T > C | | chorioretinopathy, |
| | | | lymphedema, or mental |
| | | | retardation |
| 397516156 | NM_000257.3(MYH7): | GGAGAYGGCCTCCATGAAGGAGG | Primary familial hypertrophic |
| | c.2546T > C (p.Met849Thr) | | cardiomyopathy, |
| | | | Cardiomyopathy |
| 118204430 | NM_000035.3(ALDOB): | GGAAGYGGCGTGCTGTGCTGAGG | Hereditary fructosuria |
| | c.442T > C (p.Trp148Arg) | | |
| 200198778 | NM_013382.5(POMT2): | GGAAGYAGTGGTGGAAGTAGAGG | Congenital muscular |
| | c.1997A > G (p.Tyr666Cys) | | dystrophy, Congenital |
| | | | muscular dystrophy- |
| | | | dystroglycanopathy with brain |
| | | | and eye anomalies, type A2, |
| | | | Muscular dystrophy, |
| | | | Congenital muscular |
| | | | dystrophy-dystroglycanopathy |
| | | | with mental retardation, type |
| | | | B2 |
| 754896795 | NM_004006.2(DMD): | GCTTTTYTTCAAGCTGCCCAAGG | Duchenne muscular dystrophy, |
| | c.6982A > T (p.Lys2328Ter) | | Becker muscular dystrophy, |
| | | | Dilated cardiomyopathy 3B |
| 148924904 | NM_000546.5(TP53): | GCTTGYAGATGGCCATGGCGCGG | Hereditary cancer-predisposing |
| | c.488A > G (p.Tyr163Cys) | | syndrome |
| 786204770 | NM_016035.4(COQ4): | GCTGTYGGCCGCCGGCTCCGCGG | COENZYME Q10 |
| | c.155T > C (p.Leu52Ser) | | DEFICIENCY, PRIMARY, 7 |
| 121909520 | NM_001100.3(ACTA1): | CGGYTGGCCTTGGGATTGAGGGG, | Nemaline myopathy 3 |
| | c.350A > G (p.Asn117Ser) | GCGGYTGGCCTTGGGATTGAGGG, | |
| | | CGCGGYTGGCCTTGGGATTGAGG | |
| 587776879 | NM_004656.3(BAP1): | GCCYGGGGAAAAACAGAGTCAGG | Tumor predisposition |
| | c.438 − 2A > G | | syndrome |
| 727504434 | NM_000501.3(ELN): | GCCYGAAAACACAGCCACAGAGG | Supravalvar aortic stenosis |
| | c.890 − 2A > G | | |
| 119455953 | NM_000391.3(TPP1): | GCCGGGYGTTGGTCTGTCTCTGG | Ceroid lipofuscinosis, |
| | c.1093T > C (p.Cys365Arg) | | neuronal, 2 |
| 121964983 | NM_000481.3(AMT): | GCCAGGYGGAAGTCATAGAGCGG | Non-ketotic hyperglycinemia |
| | c.125A > G (p.His42Arg) | | |
| 121908300 | NM_001005741.2(GBA): | GCCAGAYACTTTGTGAAGTAAGG, | Gaucher disease, type 1 |
| | c.751T > C (p.Tyr251His) | CCAGAYACTTTGTGAAGTAAGGG | |
| 786205083 | NM_003494.3(DYSF): | GCCAGAGYGAGTGGCTGGAGTGG | Limb-girdle muscular |
| | c.3443 − 33A > G | | dystrophy, type 2B |
| 121908133 | NM_175073.2(APTX): | GCCAAYGGTAACGGGCCTTTGGG, | Adult onset ataxia with |
| | c.602A > G (p.His201Arg) | AGCCAAYGGTAACGGGCCTTTGG | oculomotor apraxia |
| 587777195 | NM_005017.3(PCYT1A): | GCATGYTTGCTCCAACACAGAGG | Spondylometaphyseal |
| | c.571T > C (p.Phe191Leu) | | dysplasia with cone-rod |
| | | | dystrophy |
| 431905520 | NM_014714.3(IFT140): | CAAGCAGYGTGAGCTGCTCCTGG, | Renal dysplasia, retinal |
| | c.4078T > C (p.Cys1360Arg) | GCAGYGTGAGCTGCTCCTGGAGG | pigmentary dystrophy, |
| | | | cerebellar ataxia and skeletal |
| | | | dysplasia |
| 121912889 | NM_001844.4(COL2A1): | GCAGTGGYAGGTGATGTTCTGGG | Spondyloperipheral dysplasia, |
| | c.4172A > G (p.Tyr1391Cys) | | Platyspondylic lethal skeletal |
| | | | dysplasia Torrance type |
| 137854492 | NM_001363.4(DKC1): | GCAGGYAGAGATGACCGCTGTGG | Dyskeratosis congenita X- |
| | c.1069A > G (p.Thr357Ala) | | linked |
| 121434362 | NM_152783.4(D2HGDH): | GCAGGTYACCATCTCCTGGAGGG, | D-2-hydroxyglutaric aciduria 1 |
| | c.1315A > G (p.Asn439Asp) | TGCAGGTYACCATCTCCTGGAGG | |
| 80338732 | NM_002764.3(PRPS1): | GCAAATAYGCTATCTGTAGCAGG | Charcot-Marie-Tooth disease, |
| | c.344T > C (p.Met115Thr) | | X-linked recessive, type 5 |
| 387906675 | NM_000313.3(PROS1): | GATTAYATCTGTAGCCTTCGGGG, | Thrombophilia due to protein |
| | c.701A > G (p.Tyr234Cys) | AGATTAYATCTGTAGCCTTCGGG, | S deficiency, autosomal |
| | | GAGATTAYATCTGTAGCCTTCGG | recessive |
| 28935478 | NM_000061.2(BTK): | GATGGYAGTTAATGAGCTCAGGG, | |
| | c.1082A > G (p.Tyr361Cys) | TGATGGYAGTTAATGAGCTCAGG | |
| 201777056 | NM_005050.3(ABCD4): | GATGAGGYAGATGCACACAAAGG | METHYLMALONIC |
| | c.956A > G (p.Tyr319Cys) | | ACIDURIA AND |
| | | | HOMOCYSTINURIA, cblJ |
| | | | TYPE |
| 121918528 | NM_000098.2(CPT2): | GATAGGYACATATCAAACCAGGG, | Carnitine palmitoyltransferase |
| | c.359A > G (p.Tyr120Cys) | AGATAGGYACATATCAAACCAGG | II deficiency, infantile |
| 267607014 | NM_002942.4(ROBO2): | GAGAYTGGAAATTTTGGCCGTGG | Vesicoureteral reflux 2 |
| | c.2834T > C (p.Ile945Thr) | | |
| 281865192 | NM_025114.3(CEP290): | GATAYTCACAATTACAACTGGGG, | Leber congenital amaurosis 10 |
| | c.2991 + 1655A > G | AGATAYTCACAATTACAACTGGG, | |
| | | GAGATAYTCACAATTACAACTGG | |
| 386833492 | NM_000112.3(SLC26A2): | GAGAGGYGAGAAGAGGGAAGCGG | Diastrophic dysplasia |
| | c.−26 + 2T > C | | |
| 587779773 | NM_001101.3(ACTB): | GAGAAGAYGACCCAGGTGAGTGG | Baraitser-Winter syndrome 1 |
| | c.356T > C (p.Met119Thr) | | |
| 121913512 | NM_000222.2(KIT): | GACTTYGAGTTCAGACATGAGGG, | |
| | c.1924A > G (p.Lys642Glu) | GGACTTYGAGTTCAGACATGAGG | |
| 28939072 | NM_006329.3(FBLN5): | GACAYTGATGAATGTCGCTATGG | Age-related macular |
| | c.506T > C (p.Ile169Thr) | | degeneration 3 |
| 104894248 | NM_000525.3(KCNJ11): | GACAYGGTAGATGATCAGCGGGG, | Islet cell hyperplasia |
| | c.776A > G (p.His259Arg) | TGACAYGGTAGATGATCAGCGGG, | |
| | | ATGACAYGGTAGATGATCAGCGG | |
| 387907132 | NM_016464.4(TMEM138): | GACAYGAAGGGAGATGCTGAGGG, | Joubert syndrome 16 |
| | c.287A > G (p.His96Arg) | AGACAYGAAGGGAGATGCTGAGG | |
| 121918170 | NM_000275.2(OCA2): | GACATYTGGAGGGTCCCCGATGG | Tyrosinase-positive |
| | c.1465A>G (p.Asn489Asp) | | oculocutaneous albinism |
| 122467173 | NM_014009.3(FOXP3): | GACAGAGYTCCTCCACAACATGG | Insulin-dependent diabetes |
| | c.970T > C (p.Phe324Leu) | | mellitus secretory diarrhea |
| | | | syndrome |
| 137852268 | NM_000133.3(F9): | GAAYATATACCAAGGTATCCCGG | Hereditary factor IX deficiency |
| | c.1328T > C (p.Ile443Thr) | | disease |
| 149054177 | NM_001999.3(FBN2): | GAATGTAYGATAATGAACGGAGG | not specified, Macular |
| | c.3740T > C (p.Met1247Thr) | | degeneration, early-onset |
| 137854488 | NM_212482.1(FN1): | GAAGTAAYAGGTGACCCCAGGGG | Glomerulopathy with |
| | c.2918A > G (p.Tyr973Cys) | | fibronectin deposits 2 |
| 786204027 | NM_005957.4(MTHFR): | GAAGGYGTGGTAGGGAGGCACGG, | Homocysteinemia due to |
| | c.1530 + 2T > C | AAGGYGTGGTAGGGAGGCACGGG, | MTHFR deficiency |
| | | AGGYGTGGTAGGGAGGCACGGGG | |
| 104894223 | NM_012193.3(FZD4): | GAAATAYGATGGGGCGCTCAGGG, | Retinopathy of prematurity |
| | c.766A > G (p.Ile256Val) | AGAAATAYGATGGGGCGCTCAGG | |
| 137854474 | NM_000138.4(FBN1): | CTTGYGTTATGATGGATTCATGG | Marfan syndrome |
| | c.3793T > C (p.Cys1265Arg) | | |
| 587784418 | NM_006306.3(SMC1A): | CTTAYAGATCTCATCAATGTTGG | Congenital muscular |
| | c.3254A > G (p.Tyr1085Cys) | | hypertrophy-cerebral |
| | | | syndrome |
| 81002805 | NM_000059.3(BRCA2): | CTTAGGYAAGTAATGCAATATGG | Familial cancer of breast, |
| | c.316 + 2T > C | | Breast-ovarian cancer, familial |
| | | | 2, Hereditary cancer- |
| | | | predisposing syndrome |
| 121909653 | NM_182925.4(FLT4): | CTGYGGATGCACTGGGGTGCGGG, | |
| | c.3104A > G (p.His1035Arg) | TCTGYGGATGCACTGGGGTGCGG | |
| 786205107 | NM_031226.2(CYP19A1): | CTGTGYAAGTAATACAACTTTGG | Aromatase deficiency |
| | c.743 + 2T > C | | |
| 587777037 | NM_001283009.1(RTEL1): | CTGTGTGYGCCAGGGCTGTGGGG | Dyskeratosis congenita, |
| | c.3730T > C (p.Cys1244Arg) | | autosomal recessive, 5 |
| 794728380 | NM_000238.3(KCNH2): | CTGTGAGYGTGCCCAGGGGCGGG, | Cardiac arrhythmia |
| | c.1945 + 6T > C | TGAGYGTGCCCAGGGGGGGGCGG | |
| 267607987 | NM_000251.2(MSH2): | CTGGYAAAAAACCTGGTTTTTGG, | Hereditary Nonpolyposis |
| | c.2005 + 2T > C | TGGYAAAAAACCTGGTTTTTGGG | Colorectal Neoplasms |
| 397509397 | NM_006876.2(B4GAT1): | TGATYTTCAGCCTCCTTTTGGGG, | Congenital muscular |
| | c.1168A > G (p.Asn390Asp) | CTGATYTTCAGCCTCCTTTTGGG, | dystrophy-dystroglycanopathy |
| | | GCTGATYTTCAGCCTCCTTTTGG | with brain and eye anomalies, |
| | | | type A13 |
| 121918381 | NM_000040.1(APOC3): | CTGAAGYTGGTCTGACCTCAGGG, | |
| | c.280A > G (p.Thr94Ala) | GCTGAAGYTGGTCTGACCTCAGG | |
| 104894919 | NM_001015877.1(PHF6): | CTCYTGATGTTGTTGTGAGCTGG | Borjeson-Forssman-Lehmann |
| | c.769A > G (p.Arg257Gly) | | syndrome |
| 267606869 | NM_005144.4(HR): | CTCYAGGGCCGCAGGTTGGAGGG, | Marie Unna hereditary |
| | c.−218A > G | GCTCYAGGGCCGCAGGTTGGAGG, | hypotrichosis 1 |
| | | GGCGCTCYAGGGCCGCAGGTTGG | |
| 139732572 | NM_000146.3(FTL): | CTCAYGGTTGGTTGGCAAGAAGG | L-ferritin deficiency |
| | c.1A > G (p.Met1Val) | | |
| 397515418 | NM_018486.2(HDAC8): | CTCAYGATCTGGGATCTCAGAGG | Cornelia de Lange syndrome 5 |
| | c.1001A > G (p.His334Arg) | | |
| 372395294 | NM_198056.2(SCN5A): | CTCAYAGGCCATTGCGACCACGG | not provided |
| | c.1247A > G (p.Tyr416Cys) | | |
| 104895304 | NM_000431.3(MVK): | CTCAAYAGATGCCATCTCCCTGG | Hyperimmunoglobulin D with |
| | c.803T > C (p.Ile268Thr) | | periodic fever, Mevalonic |
| | | | aciduria |
| 587777188 | NM_001165899.1(PDE4D): | CTATAYTGTTCATCCCCTCTGGG, | Acrodysostosis 2, with or |
| | c.1850T > C (p.Ile617Thr) | ACTATAYTGTTCATCCCCTCTGG | without hormone resistance |
| 398123026 | NM_003867.3(FGF17): | CGTGGYTGGGGAAGGGCAGCTGG | Hypogonadotropic |
| | c.560A > G (p.Asn187Ser) | | hypogonadism 20 with or |
| | | | without anosmia |
| 121964924 | NM_001385.2(DPYS): | CGTAATAYGGGAAAAAGGCGTGG, | Dihydropyrimidinase |
| | c.1078T > C (p.Trp360Arg) | AATAYGGGAAAAAGGCGTGGTGG, | deficiency |
| | | ATAYGGGAAAAAGGCGTGGTGGG | |
| 587777301 | NM_199189.2(MATR3): | CGGYTGAACTCTCAGTCTTCTGG | Myopathy, distal, 2 |
| | c.1864A > G (p.Thr622Ala) | | |
| 200238879 | NM_000527.4(LDLR): | ACTGCGGYATGGGCGGGGCCAGG, | Familial hypercholesterolemia |
| | c.694 + 2T > C | CTGCGGYATGGGCGGGGCCAGGG, | |
| | | CGGYATGGGCGGGGCCAGGGTGG | |
| 142951029 | NM_145046.4(CALR3): | CGGTYTGAAGCGTGCAGAGATGG | Arrhythmogenic right |
| | c.245A > G (p.Lys82Arg) | | ventricular cardiomyopathy, |
| | | | Familial hypertrophic |
| | | | cardiomyopathy 19, |
| | | | Hypertrophic cardiomyopathy |
| 786200953 | NM_006785.3(MALT1): | CGCYTTGAAAAAAAAAGAAAGGG, | Combined immunodeficiency |
| | c.1019 − 2A > G | TCGCYTTGAAAAAAAAAGAAAGG | |
| 120074192 | NM_000218.2(KCNQ1): | CGCYGAAGATGAGGCAGACCAGG | Atrial fibrillation, familial, 3, |
| | c.418A > G (p.Ser140Gly) | | Atrial fibrillation |
| 267606887 | NM_005957.4(MTHFR): | CGCGGYTGAGGGTGTAGAAGTGG | Homocystinuria due to |
| | c.971A > G (p.Asn324Ser) | | MTHFR deficiency |
| 118192117 | NM_000540.2(RYR1): | CGCAYGATCCACAGCACCAATGG | Congenital myopathy with |
| | c.1205T > C (p.Met402Thr) | | fiber type disproportion, |
| | | | Central core disease |
| 199473625 | NM_198056.2(SCN5A): | CGAYGTTGAAGAGGGCAGGCAGG, | Brugada syndrome |
| | c.4978A > G (p.Ile1660Val) | AGCCCGAYGTTGAAGAGGGCAGG | |
| 794726865 | NM_000921.4(PDE3A): | CGAGGYGGTGGTGGTCCAAGTGG | Brachydactyly with |
| | c.1333A > G (p.Thr445Ala) | | hypertension |
| 606231254 | NM_005740.2(DNAL4): | CGAGGYATTGCCAGCAGTGCAGG | Mirror movements 3 |
| | c.153 + 2T > C | | |
| 786204826 | NM_004771.3(MMP20): | CGAAAYGTGTATCTCCTCCCAGG | Amelogenesis imperfecta, |
| | c.611A > G (p.His204Arg) | | hypomaturation type, IIA2 |
| 796053139 | NM_021007.2(SCN2A): | CGAAATGYAAGTCTAGTTAGAGG, | not provided |
| | c.4308 + 2T > C | GAAATGYAAGTCTAGTTAGAGGG | |
| 137854494 | NM_005502.3(ABCA1): | CCTGTGYGTCCCCCAGGGGCAGG, | Tangier disease |
| | c.4429T > C (p.Cys1477Arg) | CTGTGYGTCCCCCAGGGGCAGGG, | |
| | | TGTGYGTCCCCCAGGGGCAGGGG, | |
| | | GTGYGTCCCCCAGGGGCAGGGGG | |
| 786205144 | NM_001103.3(ACTN2): | CCTAAAAYGTTGGATGCTGAAGG | Dilated cardiomyopathy 1AA |
| | c.683T > C (p.Met228Thr) | | |
| 199919568 | NM_007254.3(PNKP): | CCGGYGAGGCCCTGGGGCGGGGG, | not provided |
| | c.1029 + 2T > C | TCCGGYGAGGCCCTGGGGCGGGG, | |
| | | ATCCGGYGAGGCCCTGGGGGGGG, | |
| | | GATCCGGYGAGGCCCTGGGGCGG | |
| 28939079 | NM_018965.3(TREM2): | TGAYCCAGGGGGTCTATGGGAGG, | Polycystic lipomembranous |
| | c.401A > G (p.Asp134Gly) | CGGTGAYCCAGGGGGTCTATGGG, | osteodysplasia with sclerosing |
| | | CCGGTGAYCCAGGGGGTCTATGG | leukoencephalopathy |
| 193302855 | NM_032520.4(GNPTG): | CCCYGAAGGTGGAGGATGCAGGG, | Mucolipidosis III Gamma |
| | c.610 − 2A > G | GCCCYGAAGGTGGAGGATGCAGG | |
| 111033708 | NM_000155.3(GALT): | CCCTYGGGTGCAGGTTTGTGAGG | Deficiency of UDPglucose- |
| | c.499T > C (p.Trp167Arg) | | hexose-1-phosphate |
| | | | uridylyltransferase |
| 28933378 | NM_000174.4(GP9): | CCCAYGTACCTGCCGCGCCCTGG | Bernard Soulier syndrome, |
| | c.70T > C (p.Cys24Arg) | | Bernard-Soulier syndrome |
| | | | type C |
| 364897 | NM_000157.3(GBA): | CCAYTGGTCTTGAGCCAAGTGGG, | Gaucher disease, Subacute |
| | c.680A > G (p.Asn227Ser) | TCCAYTGGTCTTGAGCCAAGTGG | neuronopathic Gaucher |
| | | | disease, Gaucher disease, type |
| | | | 1 |
| 796052551 | NM_000833.4(GRIN2A): | CCAYGTTGTCAATGTCCAGCTGG | not provided |
| | c.2449A > G (p.Met817Val) | | |
| 63751006 | NM_002087.3(GRN): | CCAYGTGGACCCTGGTGAGCTGG | Frontotemporal dementia, |
| | c.2T > C (p.Met1Thr) | | ubiquitin-positive |
| 786203997 | NM_001031.4(RPS28): | TGTCCAYGATGGCGGCGCGGCGG, | Diamond-Blackfan anemia |
| | c.1A > G (p.Met1 Val) | CCAYGATGGCGGCGCGGCGGCGG | with microtia and cleft palate |
| 121908595 | NM_002755.3(MAP2K1): | CCAYAGAAGCCCACGATGTACGG | Cardiofaciocutaneous |
| | c.389A > G (p.Tyr130Cys) | | syndrome 3, Rasopathy |
| 398122910 | NM_000431.3(MVK): | CCAGGYATCCCGGGGGTAGGTGG, | Porokeratosis, disseminated |
| | c.1039 + 2T > C | CAGGYATCCCGGGGGTAGGTGGG | superficial actinic 1 |
| 119474039 | NM_020365.4(EIF2B3): | CCAGAYTGTCAGCAAACACCTGG | Leukoencephalopathy with |
| | c.1037T > C (p.Ile346Thr) | | vanishing white matter |
| 587777866 | NM_000076.2(CDKN1C): | CCAAGYGAGTACAGCGCACCTGG, | Beckwith-Wiedemann |
| | c.*5 + 2T > C | CAAGYGAGTACAGCGCACCTGGG, | syndrome |
| | | AAGYGAGTACAGCGCACCTGGGG | |
| 121918530 | NM_005587.2(MEF2A): | AGAYTACCACCACCTGGTGGAGG, | |
| | c.788A > G (p.Asn263Ser) | CCAAGAYTACCACCACCTGGTGG | |
| 483352818 | NM_000211.4(ITGB2): | CATGYGAGTGCAGGCGGAGCAGG | Leukocyte adhesion deficiency |
| | c.1877 + 2T > C | | type 1 |
| 460184 | NM_000186.3(CFH): | CAGYTGAATTTGTGTGTAAACGG | Atypical hemolytic-uremic |
| | c.3590T > C (p.Val1197Ala) | | syndrome 1 |
| 121908423 | NM_004795.3(KL): | CAGYGGTACAGGGTGACCACGGG, | |
| | c.578A > G (p.His193Arg) | CCAGYGGTACAGGGTGACCACGG | |
| 281860300 | NM_005247.2(FGF3): | GCAGYAGAGCTTGCGGCGCCGGG, | Deafness with labyrinthine |
| | c.146A > G (p.Tyr49Cys) | CAGYAGAGCTTGCGGCGCCGGGG, | aplasia microtia and |
| | | CGCAGYAGAGCTTGCGGCGCCGG | microdontia (LAMM) |
| 28935488 | NM_000169.2(GLA): | CAGTTAGYGATTGGCAACTTTGG | Fabry disease |
| | c.806T > C (p.Val269Ala) | | |
| 587776514 | NM_173560.3(RFX6): | CAGTGGYGAGACTCGCCCGCAGG, | Mitchell-Riley syndrome |
| | c.380 + 2T > C | AGTGGYGAGACTCGCCCGCAGGG | |
| 104894117 | NM_178138.4(LHX3): | CAGGTGGYACACGAAGTCCTGGG | Pituitary hormone deficiency, |
| | c.332A > G (p.Tyr111Cys) | | combined 3 |
| 34878913 | NM_000184.2(HBG2): | CAGAGGTYCTTTGACAGCTTTGG | Cyanosis, transient neonatal |
| | c.125T > C (p.Phe42Ser) | | |
| 120074124 | NM_000543.4(SMPD1): | AGCACYTGTGAGGAAGTTCCTGG, | Sphingomyelin/cholesterol |
| | c.911T > C (p.Leu304Pro) | GCACYTGTGAGGAAGTTCCTGGG, | lipidosis, Niemann-Pick |
| | | CACYTGTGAGGAAGTTCCTGGGG | disease, type A, Niemann-Pick |
| | | | disease, type B |
| 281860272 | NM_005211.3(CSF1R): | CACYGAGGGAAAGCACTGCAGGG, | Hereditary diffuse |
| | c.2320 − 2A > G | GCACYGAGGGAAAGCACTGCAGG | leukoencephalopathy with |
| | | | spheroids |
| 128624216 | NM_000033.3(ABCD1): | CACTGYTGACGAAGGTAGCAGGG, | Adrenoleukodystrophy |
| | c.443A > G (p.Asn148Ser) | GCACTGYTGACGAAGGTAGCAGG | |
| 398124257 | NM_012463.3(ATP6V0A2): | CACTGYGAGTAAGCTGGAAGTGG | Cutis laxa with osteodystrophy |
| | c.825 + 2T > C | | |
| 267606679 | NM_004183.3(BEST1): | CACTGGYGTATACACAGGTGAGG | Vitreoretinochoroidopathy |
| | c.704T > C (p.Val235Ala) | | dominant |
| 397514518 | NM_000344.3(SMN1): | CACTGGAYATGGAAATAGAGAGG | Kugelberg-Welander disease |
| | c.388T > C (p.Tyr130His) | | |
| 143946794 | NM_001946.3(DUSP6): | CACTAYTGGGGTCTCGGTCAAGG | Hypogonadotropic |
| | c.566A > G (p.Asn189Ser) | | hypogonadism 19 with or |
| | | | without anosmia |
| 397516076 | NM_000256.3(MYBPC3): | GCACGYGAGTGGCCATCCTCAGG, | Familial hypertrophic |
| | c.821 + 2T > C | CACGYGAGTGGCCATCCTCAGGG | cardiomyopathy 4, not |
| | | | specified |
| 149977726 | NM_001257988.1(TYMP): | CACGAGTYTCTTACTGAGAATGG, | |
| | c.665A > G (p.Lys222Arg) | GAGTYTCTTACTGAGAATGGAGG | |
| 121917770 | NM_003361.3(UMOD): | CACAYTGACACATGTGGCCAGGG, | Familial juvenile gout |
| | c.383A > G (p.Asn128Ser) | CCACAYTGACACATGTGGCCAGG | |
| 121909008 | NM_000492.3(CFTR): | CACATAAYACGAACTGGTGCTGG | Cystic fibrosis |
| | c.2738A > G (p.Tyr913Cys) | | |
| 137852819 | NM_003688.3(CASK): | CACAGYGGGTCCCTGTCTCCTGG, | FG syndrome 4 |
| | c.2740T > C (p.Trp914Arg) | ACAGYGGGTCCCTGTCTCCTGGG | |
| 74315320 | NM_024009.2(GJB3): | CAAYGATGAGCTTGAAGATGAGG | Deafness, autosomal recessive |
| | c.421A > G (p.Ile141Val) | | |
| 80356747 | NM_001701.3(BAAT): | CAAYGAAGAGGAATTGCCCCTGG | Atypical hemolytic-uremic |
| | c.967A > G (p.Ile323Val) | | syndrome 1 |
| 180177324 | NM_012203.1(GRHPR): | CAAGTYGTTAGCTGCCAACAAGG | Primary hyperoxaluria, type II |
| | c.934A > G (p.Asn312Asp) | | |
| 281860274 | NM_005211.3(CSF1R): | CAAGAYTGGGGACTTCGGGCTGG | Hereditary diffuse |
| | c.2381T > C (p.Ile794Thr) | | leukoencephalopathy with |
| | | | spheroids |
| 398122908 | NM_005334.2(HCFC1): | CAAGAYGGCGGCTCCCAGGGAGG | Mental retardation 3, X-linked |
| | c.−970T > C | | |
| 548076633 | NM_002693.2(POLG): | CAAGAGGYTGGTGATCTGCAAGG | not provided |
| | c.3470A > G (p.Asn1157Ser) | | |
| 120074146 | NM_000019.3(ACAT1): | CAAGAAYAGTAGGTAAGGCCAGG | Deficiency of acetyl-CoA |
| | c.935T > C (p.Ile312Thr) | | acetyltransferase |
| 397514489 | NM_005340.6(HINT1): | CAAGAAAYGTGCTGCTGATCTGG, | Gamstorp-Wohlfart syndrome |
| | c.250T > C (p.Cys84Arg) | AAGAAAYGTGCTGCTGATCTGGG | |
| 587783539 | NM_178151.2(DCX): | CAAAATAYGGAACTTGATTTTGG | Heterotopia |
| | c.2T > C (p.Met1Thr) | | |
| 104894765 | NM_005448.2(BMP15): | ATTGAAAYAGAGTAACAAGAAGG | Ovarian dysgenesis 2 |
| | c.704A > G (p.Tyr235Cys) | | |
| 137852429 | NM_000132.3(F8): | ATGYTGGAGGCTTGGAACTCTGG | Hereditary factor VIII |
| | c.1892A > G (p.Asn631Ser) | | deficiency disease |
| 72558441 | NM_000531.5(OTC):c.779T | ATGTATYAATTACAGACACTTGG | not provided |
| | >C (p.Leu260Ser) | | |
| 398123765 | NM_003494.3(DYSF): | ATGGYAAGGAGCAAGGGAGCAGG | Limb-girdle muscular |
| | c.1284 + 2T > C | | dystrophy, type 2B |
| 387906924 | NM_020191.2(MRPS22): | ATCYTAGGGTAAGGTGACTTAGG | Combined oxidative |
| | c.644T > C (p.Leu215Pro) | | phosphorylation deficiency 5 |
| 397518039 | NM_206933.2(USH2A): | ATCYAAAGCAAAAGACAAGCAGG | Retinitis pigmentosa, Usher |
| | c.8559 − 2A > G | | syndrome, type 2A |
| 5742905 | NM_000071.2(CBS): | ATCAYTGGGGTGGATCCCGAAGG, | Homocystinuria due to CBS |
| | c.833T > C (p.Ile278Thr) | TCAYTGGGGTGGATCCCGAAGGG | deficiency, Homocystinuria, |
| | | | pyridoxine-responsive |
| 397507473 | NM_004333.4(BRAF): | ATCATYTGGAACAGTCTACAAGG, | Cardiofaciocutaneous |
| | c.1403T > C (p.Phe468Ser) | TCATYTGGAACAGTCTACAAGGG | syndrome, Rasopathy |
| 786204056 | NM_000264.3(PTCH1): | TCATTGYGAGTGTATTATAAGGG, | Gorlin syndrome |
| | c.3168 + 2T > C | ATCATTGYGAGTGTATTATAAGG, | |
| | | CATTGYGAGTGTATTATAAGGGG | |
| 72558484 | NM_000531.5(OTC): | ATCATGGYAAGCAAGAAACAAGG | not provided |
| | c.1005 + 2T > C | | |
| 199473074 | NM_000335.4(SCN5A): | ATAYAGTTTTCAGGGCCCGGAGG, | Brugada syndrome |
| | c.688A > G (p.Ile230Val) | CTGATAYAGTTTTCAGGGCCCGG | |
| 111033273 | NM_206933.2(USH2A): | ATATAGAYGCCTCTGCTCCCAGG | Usher syndrome, type 2A |
| | c.1606T > C (p.Cys536Arg) | | |
| 72556290 | NM_000531.5(OTC): | ATAGTGTYCCTAAAAGGCACGGG | not provided |
| | c.542A > G (p.Glu181Gly) | | |
| 121918711 | NM_004612.3(TGFBR1): | ATAGATGYCAGCACGTTTGAAGG | Loeys-Dietz syndrome 1 |
| | c.1199A > G (p.Asp400Gly) | | |
| 104886288 | NM_000495.4(COL4A5): | AGTAYGTGAAGCTCCAGCTGTGG | Alport syndrome, X-linked |
| | c.4699T > C (p.Cys1567Arg) | | recessive |
| 144637717 | NM_016725.2(FOLR1): | CTTCAGGYGAGGGCTGGGGTGGG, | not provided |
| | c.493 + 2T > C | AGGYGAGGGCTGGGGTGGGCAGG | |
| 72558492 | NM_000531.5(OTC): | AGGTGAGYAATCTGTCAGCAGGG | not provided |
| | c.1034A > G (p.Tyr345Cys) | | |
| 62638745 | NM_000121.3(EPOR): | AGGGYTGGAGTAGGGGCCATCGG | Acute myeloid leukemia, M6 |
| | c.1460A > G (p.Asn487Ser) | | type, Familial erythrocytosis, 1 |
| 387907021 | NM_031427.3(DNAL1): | AGGGAYTGCCTACAAACACCAGG | Kartagener syndrome, Ciliary |
| | c.449A > G (p.Asn150Ser) | | dyskinesia, primary, 16 |
| 397514488 | NM_001161581.1(POC1A): | AGCYGTGGGACAAGAGCAGCCGG | Short stature, onychodysplasia, |
| | c.398T > C (p.Leu133Pro) | | facial dysmorphism, and |
| | | | hypotrichosis |
| 154774633 | NM_017882.2(CLN6): | AGCYGGTATTCCCTCTCGAGTGG | Adult neuronal ceroid |
| | c.200T > C (p.Leu67Pro) | | lipofuscinosis |
| 111033700 | NM_000155.3(GALT): | AGCYGGGTGCCCAGTACCCTTGG | Deficiency of UDPglucose- |
| | c.482T > C (p.Leu161Pro) | | hexose-1-phosphate |
| | | | uridylyltransferase |
| 128621198 | NM_000061.2(BTK): | GAGCYGGGGACTGGACAATTTGG, | X-linked agammaglobulinemia |
| | c.1223T > C (p.Leu408Pro) | AGCYGGGGACTGGACAATTTGGG | |
| 137852611 | NM_000211.4(ITGB2): | AGCYAGGTGGCGACCTGCTCCGG | Leukocyte adhesion deficiency |
| | c.446T > C (p.Leu149Pro) | | |
| 121908838 | NM_003722.4(TP63): | AGCTTYTTTGTAGACAGGCATGG | Split-hand/foot malformation 4 |
| | c.697A > G (p.Lys233Glu) | | |
| 397515869 | NM_000169.2(GLA): | AGCTGTGYGATGAAGCAGGCAGG | not specified |
| | c.1153A > G (p.Thr385Ala) | | |
| 118204064 | NM_000237.2(LPL): | GCTGGAYCGAGGCCTTAAAAGGG, | Hyperlipoproteinemia, type I |
| | c.548A > G (p.Asp183Gly) | AGCTGGAYCGAGGCCTTAAAAGG | |
| 128620186 | NM_000061.2(BTK): | AGCTAYGGCCGCAGTGATTCTGG | X-linked agammaglobulinemia |
| | c.2T > C (p.Met1Thr) | | |
| 786204132 | NM_014946.3(SPAST): | ATTGYCTTCCCATTCCCAGGTGG, | Spastic paraplegia 4, |
| | c.1165A > G (p.Thr389Ala) | AGCATTGYCTTCCCATTCCCAGG | autosomal dominant |
| 199473661 | NM_000218.2(KCNQ1): | CAGCAAGBACGTGGGCCTCTGGG, | Congenital long QT syndrome, |
| | c.550T > C (p.Tyr184His) | AGCAAGBACGTGGGCCTCTGGGG, | Cardiac arrhythmia |
| | | GCAAGBACGTGGGCCTCTGGGGG | |
| 387907129 | NM_024599.5(RHBDF2): | AGAYTGTGGATCCGCTGGCCCGG | Howel-Evans syndrome |
| | c.557T > C (p.Ile186Thr) | | |
| 387906702 | NM_006306.3(SMC1A): | AGAYTGGTGTGCGCAACATCCGG | Congenital muscular |
| | c.2351T > C (p.Ile784Thr) | | hypertrophy-cerebral |
| | | | syndrome |
| 193929348 | NM_000525.3(KCNJ11): | AGAYGAGGGTCTCAGCCCTGCGG | Permanent neonatal diabetes |
| | c.544A > G (p.Ile182Val) | | mellitus |
| 121908934 | NM_004086.2(COCH): | AGATAYGGCTTCTAAACCGAAGG | Deafness, autosomal dominant |
| | c.1535T > C (p.Met512Thr) | | 9 |
| 397514377 | NM_000060.3(BTD): | AGAGGYTGTGTTTACGGTAGCGG | Biotinidase deficiency |
| | c.641A > G (p.Asn214Ser) | | |
| 72552295 | NM_000531.5(OTC): | AGAAGAYGCTGTTTAATCTGAGG | not provided |
| | c.2T > C (p.Met1Thr) | | |
| 201893545 | NM_016247.3(IMPG2): | ACTYTTTGGGATCGACTTCCTGG | Macular dystrophy, |
| | c.370T > C (p.Phe124Leu) | | vitelliform, 5 |
| 121434469 | m.4290T > C | ACTYTGATAGAGTAAATAATAGG | |
| 121918733 | NM_006920.4(SCN1A): | ACTTYTATAGTATTGAATAAAGG, | Severe myoclonic epilepsy in |
| | c.269T > C (p.Phe90Ser) | CTTYTATAGTATTGAATAAAGGG | infancy |
| 121434471 | m.4291T > C | ACTTYGATAGAGTAAATAATAGG | Hypertension, |
| | | | hypercholesterolemia, and |
| | | | hypomagnesemia, |
| | | | mitochondrial |
| 606231289 | NM_001302946.1(TRNT1): | ACTTYATTTGACTACTTTAATGG | Sideroblastic anemia with B- |
| | c.497T > C (p.Leu166Ser) | | cell immunodeficiency, |
| | | | periodic fevers, and |
| | | | developmental delay |
| 63750067 | NM_000517.4(HBA2): | CTTYATTCAAAGACCAGGAAGGG, | Hemoglobin H disease, |
| | c.*92A > G | ACTTYATTCAAAGACCAGGAAGG | nondeletional |
| 121918734 | NM_006920.4(SCN1A): | ACTTTTAYAGTATTGAATAAAGG, | Severe myoclonic epilepsy in |
| | c.272T > C (p.Ile91Thr) | CTTTTAYAGTATTGAATAAAGGG | infancy |
| 137854557 | NM_000267.3(NF1): | ACTTAYAGCTTCTTGTCTCCAGG | Neurofibromatosis, type 1 |
| | c.1466A > G (p.Tyr489Cys) | | |
| 397514626 | NM_018344.5(SLC29A3): | ACTGATAYCAGGTGAGAGCCAGG, | Histiocytosis- |
| | c.607T > C (p.Ser203Pro) | CTGATAYCAGGTGAGAGCCAGGG | lymphadenopathy plus |
| | | | syndrome |
| 118204440 | NM_000512.4(GALNS): | ACGYTGAGCTGGGGCTGCGCGGG, | Mucopolysaccharidosis, MPS- |
| | c.1460A > G (p.Asn487Ser) | CACGYTGAGCTGGGGCTGCGCGG | IV-A |
| 587776843 | NG_012088.1:g.2209A > G | ACCYTATGATCCGCCCGCCTTGG | |
| 137853033 | NM_001080463.1(DYNC2H1): | ACCYGTGAAGGGAACAGAGATGG | Short-rib thoracic dysplasia 3 |
| | c.4610A > G (p.Gln1537Arg) | | with or without polydactyly |
| 28933698 | NM_000435.2(NOTCH3): | TTCACCYGTATCTGTATGGCAGG, | Cerebral autosomal dominant |
| | c.1363T > C (p.Cys455Arg) | ACCYGTATCTGTATGGCAGGTGG | arteriopathy with subcortical |
| | | | infarcts and |
| | | | leukoencephalopathy |
| 587776766 | NM_000463.2(UGT1A1): | ACCYGAGATGCAAAATAGGGAGG, | Crigler Najjar syndrome, type |
| | c.1085 − 2A > G | GTGACCYGAGATGCAAAATAGGG, | 1 |
| | | GGTGACCYGAGATGCAAAATAGG | |
| 587781628 | NM_001128425.1(MUTYH): | ACCYGAGAGGGAGGGCAGCCAGG | Hereditary cancer-predisposing |
| | c.1187 − 2A > G | | syndrome, Carcinoma of colon |
| 61755817 | NM_000322.4(PRPH2): | ACCTGYGGGTGCGTGGCTGCAGG, | Retinitis pigmentosa |
| | c.736T > C (p.Trp246Arg) | CCTGYGGGTGCGTGGCTGCAGGG | |
| 121909184 | NM_001089.2(ABCA3): | ACCGTYGTGGCCCAGCAGGACGG | Surfactant metabolism |
| | c.1702A > G (p.Asn568Asp) | | dysfunction, pulmonary, 3 |
| 121434466 | m.4269A > G | ACAYATTTCTTAGGTTTGAGGGG, | |
| | | GACAYATTTCTTAGGTTTGAGGG, | |
| | | AGACAYATTTCTTAGGTTTGAGG | |
| 794726768 | NM_001165963.1(SCN1A): | ACAYATATCCCTCTGGACATTGG | Severe myoclonic epilepsy in |
| | c.1048A > G (p.Met350Val) | | infancy |
| 28934876 | NM_001382.3(DPAGT1): | ACAYAGTACAGGATTCCTGCGGG, | Congenital disorder of |
| | c.509A > G (p.Tyr170Cys) | GACAYAGTACAGGATTCCTGCGG | glycosylation type 1J |
| 104894749 | NM_000054.4(AVPR2): | ACAYAGGTGCGACGGCCCCAGGG, | Nephrogenic diabetes |
| | c.614A > G (p.Tyr205Cys) | GACAYAGGTGCGACGGCCCCAGG | insipidus, Nephrogenic |
| | | | diabetes insipidus, X-linked |
| 128621205 | NM_000061.2(BTK): | ACATTYGGGCTTTTGGTAAGTGG | X-linked agammaglobulinemia |
| | c.1741T > C (p.Trp581Arg) | | |
| 28940892 | NM_000529.2(MC2R): | ACATGYAGCAGGCGCAGTAGGGG, | ACTH resistance |
| | c.761A > G (p.Tyr254Cys) | GACATGYAGCAGGCGCAGTAGGG, | |
| | | AGACATGYAGCAGGCGCAGTAGG | |
| 794726844 | NM_001165963.1(SCN1A): | ACATAYATCCCTCTGGACATTGG | Severe myoclonic epilepsy in |
| | c.1046A > G (p.Tyr349Cys) | | infancy |
| 587783083 | NM_003159.2(CDKL5): | ACAGTYTTAGGACATCATTGTGG | not provided |
| | c.449A > G (p.Lys150Arg) | | |
| 397514651 | NM_000108.4(DLD): | ACAGTTAYAGGTTCTGGTCCTGG, | Maple syrup urine disease, |
| | c.140T > C (p.Ile47Thr) | GTTAYAGGTTCTGGTCCTGGAGG | type 3 |
| 794727060 | NM_001848.2(COL6A1): | ACAAGGYGAGCGTGGGCTGCTGG, | Ullrich congenital muscular |
| | c.957 + 2T > C | CAAGGYGAGCGTGGGCTGCTGGG | dystrophy, Bethlem myopathy |
| 72554346 | NM_000531.5(OTC): | ACAAGATYGTCTACAGAAACAGG | not provided |
| | c.284T > C (p.Leu95Ser) | | |
| 483353031 | NM_002136.2(HNRNPA1): | AATYTTGGAGGCAGAAGCTCTGG | Chronic progressive multiple |
| | c.841T > C (p.Phe281Leu) | | sclerosis |
| 104894271 | NM_000315.2(PTH): | AATTYGTTTTCTTACAAAATCGG | Hypoparathyroidism familial |
| | c.52T > C (p.Cys18Arg) | | isolated |
| 267608260 | NM_015599.2(PGM3): | AATGTYGGCACCATCCTGGGAGG | Immunodeficiency 23 |
| | c.248T > C (p.Leu83Ser) | | |
| 267606900 | NM_018109.3(MTPAP): | AATGGATYCTGAATGTACAGAGG | Ataxia, spastic, 4, autosomal |
| | c.1432A > G (p.Asn478Asp) | | recessive |
| 796053169 | NM_021007.2(SCN2A): | AATAAAGYAGAATATCGTCAAGG | not provided |
| | c.387 − 2A > G | | |
| 104894937 | NM_000116.4(TAZ): | AAGYGTGTGCCTGTGTGCCGAGG | 3-Methylglutaconic aciduria |
| | c.352T > C (p.Cys118Arg) | | type 2 |
| 104893911 | NM_001018077.1(NR3C1): | AAGYGATTGCAGCAGTGAAATGG | Pseudohermaphroditism, |
| | c.1712T > C (p.Val571Ala) | | female, with hypokalemia, due |
| | | | to glucocorticoid resistance |
| 397514472 | NM_004813.2(PEX16): | AAGYAGATTTTCTGCCAGGTGGG, | Peroxisome biogenesis |
| | c.992A > G (p.Tyr331Cys) | GAAGYAGATTTTCTGCCAGGTGG, | disorder 8B |
| | | GTAGAAGYAGATTTTCTGCCAGG | |
| 121918407 | NM_001083112.2(GPD2): | AAGTYTGATGCAGACCAGAAAGG | Diabetes mellitus type 2 |
| | c.1904T > C (p.Phe635Ser) | | |
| 63751110 | NM_000251.2(MSH2): | AAGGAAYGTGTTTTACCCGGAGG | Hereditary Nonpolyposis |
| | c.595T > C (p.Cys199Arg) | | Colorectal Neoplasms |
| 119450945 | NM_000026.2(ADSL): | AAGAYGGTGACAGAAAAGGCAGG | Adenylosuccinate lyase |
| | c.674T > C (p.Met225Thr) | | deficiency |
| 113993988 | NM_002863.4(PYGL): | AAGAAYATGCCCAAAACATCTGG | Glycogen storage disease, type |
| | c.2461T > C (p.Tyr821His) | | VI |
| 119485091 | NM_022041.3(GAN): | AAGAAAAYCTACGCCATGGGTGG, | Giant axonal neuropathy |
| | c.1268T > C (p.Ile423Thr) | AAAAYCTACGCCATGGGTGGAGG | |
| 137852419 | NM_000132.3(F8): | AACYAGAGTAATAGCGGGTCAGG | Hereditary factor VIII |
| | c.1660A > G (p.Ser554Gly) | | deficiency disease |
| 121964967 | NM_000071.2(CBS): | GAACTYGGTCCTGCGGGATGGGG, | Homocystinuria, pyridoxine- |
| | c.1150A > G (p.Lys384Glu) | AACTYGGTCCTGCGGGATGGGGG, | responsive |
| | | GGAACTYGGTCCTGCGGGATGGG, | |
| | | AGGAACTYGGTCCTGCGGGATGG | |
| 137852376 | NM_000132.3(F8): | AACAGAYAATGTCAGACAAGAGG | Hereditary factor VIII |
| | c.1754T > C (p.Ile585Thr) | | deficiency disease |
| 121917930 | NM_006920.4(SCN1A): | AACAAYGGTGGAACCTGAGAAGG | Generalized epilepsy with |
| | c.3577T > C (p.Trp1193Arg) | | febrile seizures plus, type 1, |
| | | | Generalized epilepsy with |
| | | | febrile seizures plus, type 2 |
| 28939717 | NM_003907.2(EIF2B5): | AAATGYTTCCTGTACACCTGTGG | Leukoencephalopathy with |
| | c.271A > G (p.Thr91Ala) | | vanishing white matter |
| 80357276 | NM_007294.3(BRCA1): | AAATATGYGGTCACACTTTGTGG | Familial cancer of breast, |
| | c.122A > G (p.His41Arg) | | Breast-ovarian cancer, familial |
| | | | 1 |
| 397515897 | NM_000256.3(MYBPC3): | AAAGGYGGGCCTGGGACCTGAGG | Familial hypertrophic |
| | c.1351 + 2T > C | | cardiomyopathy 4, |
| | | | Cardiomyopathy |
| 397514491 | NM_005340.6(HINT1): | AAAAYGTGTTGGTGCTTGAGGGG, | Gamstorp-Wohlfart syndrome |
| | c.152A > G (p.His51Arg) | GAAAAYGTGTTGGTGCTTGAGGG, | |
| | | AGAAAAYGTGTTGGTGCTTGAGG | |
| 387907164 | NM_020894.2(UVSSA): | AAAATTYGCAAGTATGTCTTAGG, | UV-sensitive syndrome 3 |
| | c.94T > C (p.Cys32Arg) | AAATTYGCAAGTATGTCTTAGGG | |
| 118161496 | NM_025152.2(NUBPL): | TGGTTCYAATGGATGTCTGCTGG, | Mitochondrial complex I |
| | c.815 − 27T > C | GGTTCYAATGGATGTCTGCTGGG | deficiency |
| 764313717 | NM_005609.2(PYGM): | TGGCTGYCAGGGACCCAGCAAGG, | |
| | c.425528del | CTGYCAGGGACCCAGCAAGGAGG | |
| 28934568 | NM_003242.5(TGFBR2): | AGTTCCYGACGGCTGAGGAGCGG | Loeys-Dietz syndrome 2 |
| | c.923T > C (p.Leu308Pro) | | |
| 121913461 | NM_007313.2(ABL1): | CCAGYACGGGGAGGTGTACGAGG, | |
| | c.814T > C (p.Tyr272His) | CAGYACGGGGAGGTGTACGAGGG | |
| 377750405 | NM_173551.4(ANKS6): | AGGGCYGTCGGACCTTCGAGTGG, | Nephronophthisis 16 |
| | c.1322A > G (p.Gln441Arg) | GGGCYGTCGGACCTTCGAGTGGG, | |
| | | GGCYGTCGGACCTTCGAGTGGGG | |
| 57639980 | NM_001927.3(DES): | ATTCCCYGATGAGGCAGATGCGG, | Myofibrillar myopathy 1 |
| | c.1034T > C (p.Leu345Pro) | TTCCCYGATGAGGCAGATGCGGG | |
| 147391618 | NM_020320.3(RARS2): | ATACCYGGCAAGCAATAGCGCGG | Pontocerebellar hypoplasia |
| | c.35A > G (p.Gln12Arg) | | type 6 |
| 182650126 | NM_002977.3(SCN9A): | GTAAYTGCAAGATCTACAAAAGG | Small fiber neuropathy |
| | c.2215A > G (p.Ile739Val) | | |
| 80358278 | NM_004700.3(KCNQ4): | ACATYGACAACCATCGGCTATGG | DFNA 2 Nonsyndromic |
| | c.842T > C (p.Leu281Ser) | | Hearing Loss |
| 786204012 | NM_005957.4(MTHFR): | GACCYGCTGCCGTCAGCGCCTGG | Homocysteinemia due to |
| | c.388T > C (p.Cys130Arg) | | MTHFR deficiency |
| 786204037 | NM_005957.4(MTHFR): | TCCCACYGGACAACTGCCTCTGG | Homocysteinemia due to |
| | c.1883T > C (p.Leu628Pro) | | MTHFR deficiency |
| 202147607 | NM_000140.3(FECH): | GTAGAYACCTTAGAGAACAATGG | Erythropoietic protoporphyria |
| | c.1137 + 3A > G | | |
| 122456136 | NM_005183.3(CACNA1F): | TGCCAYTGCTGTGGACAACCTGG | |
| | c.2267T > C (p.Ile756Thr) | | |
| 786204851 | NM_007374.2(SIX6): | GTCGCYGCCCGTGGCCCCTGCGG | Cataract, microphthalmia and |
| | c.110T > C (p.Leu37Pro) | | nystagmus |
| 794728167 | NM_000138.4(FBN1): | ATTGGYACGTGATCCATCCTAGG | Thoracic aortic aneurysms and |
| | c.1468 + 2T > C | | aortic dissections |
| 121964909 | NM_000027.3(AGA): | GACGGCYCTGTAGGCTTTGGAGG | Aspartylglycosaminuria |
| | c.214T > C (p.Ser72Pro) | | |
| 121964978 | NM_000170.2(GLDC): | CGGCCAYGCAGTCCTGTGCCAGG, | Non-ketotic hyperglycinemia |
| | c.2T > C (p.Met1Thr) | GGCCAYGCAGTCCTGTGCCAGGG | |
| 121965008 | NM_000398.6(CYB5R3): | CTGCYGGTCTACCAGGGCAAAGG | METHEMOGLOBINEMIA, |
| | c.446T > C (p.Leu149Pro) | | TYPE I |
| 121965064 | NM_000128.3(F11): | TGATYTCTTGGGAGAAGAACTGG | Hereditary factor XI deficiency |
| | c.901T > C (p.Phe301Leu) | | disease |
| 45517398 | NM_000548.3(TSC2): | GCCCYGCACGCAAATGTGAGTGG, | Tuberous sclerosis syndrome |
| | c.5150T > C (p.Leu1717Pro) | CCCYGCACGCAAATGTGAGTGGG | |
| 786205857 | NM_015662.2(IFT172): | TTGTGCYAGGAAGTTATGACAGG | RETINITIS PIGMENTOSA |
| | c.770T > C (p.Leu257Pro) | | 71 |
| 786205904 | NM_001135669.1(XPR1): | GCGTTYACGTGTCCCCCCTTTGG, | BASAL GANGLIA |
| | c.653T > C (p.Leu218Ser) | CGTTYACGTGTCCCCCCTTTGGG | CALCIFICATION, |
| | | | IDIOPATHIC, 6 |
| 104893704 | NM_000388.3(CASR): | ACGCTYTCAAGGTGGCTGCCCGG, | Hypercalciuric hypercalcemia |
| | c.2641T > C (p.Phe881Leu) | CGCTYTCAAGGTGGCTGCCCGGG | |
| 104893747 | NM_198159.2(MITF): | ACTTYCCCTTATTCCATCCACGG, | Waardenburg syndrome type |
| | c.1195T > C (p.Ser399Pro) | CTTYCCCTTATTCCATCCACGGG | 2A |
| 104893770 | NM_000539.3(RHO): | CATGYTTCTGCTGATCGTGCTGG, | Retinitis pigmentosa 4 |
| | c.133T > C (p.Phe45Leu) | ATGYTTCTGCTGATCGTGCTGGG | |
| 28937596 | NM_003907.2(EIF2B5): | AGGCCYGGAGCCCTGTTTTTAGG | Leukoencephalopathy with |
| | c.1882T > C (p.Trp628Arg) | | vanishing white matter |
| 104893876 | NM_001151.3(SLC25A4): | GCAGCYCTTCTTAGGGGGTGTGG | Autosomal dominant |
| | c.293T > C (p.Leu98Pro) | | progressive external |
| | | | ophthalmoplegia with |
| | | | mitochondrial DNA deletions |
| | | | 2 |
| 104893883 | NM_006005.3(WFS1): | ACCATCCYGGAGGGCCGCCTGGG | WFS1-Related Disorders |
| | c.2486T > C (p.Leu829Pro) | | |
| 104893962 | NM_000165.4(GJA1): | CTACYCAACTGCTGGAGGGAAGG | Oculodentodigital dysplasia |
| | c.52T > C (p.Ser18Pro) | | |
| 104893978 | NM_000434.3(NEU1): | CCTCCYGGCGCTACGGAAGTGGG, | Sialidosis, type II |
| | c.718T > C (p.Trp240Arg) | GCCTCCYGGCGCTACGGAAGTGG, | |
| | | CTCCYGGCGCTACGGAAGTGGGG | |
| 104894092 | NM_002546.3(TNFRSF11B): | TAGAGYTCTGCTTGAAACATAGG | Hyperphosphatasemia with |
| | c.349T > C (p.Phe117Leu) | | bone disease |
| 104894135 | NM_000102.3(CYP17A1): | CATCGCGYCCAACAACCGTAAGG, | Complete combined 17-alpha- |
| | c.316T > C (p.Ser106Pro) | ATCGCGYCCAACAACCGTAAGGG | hydroxylase/17,20-lyase |
| | | | deficiency |
| 104894151 | NM_000102.3(CYP17A1): | AGCTCTYCCTCATCATGGCCTGG | Combined partial 17-alpha- |
| | c.1358T > C (p.Phe453Ser) | | hydroxylase/17,20-lyase |
| | | | deficiency |
| 36015961 | NM_000518.4(HBB): | TGTGTGCYGGCCCATCACTTTGG | Beta thalassemia intermedia |
| | c.344T > C (p.Leu115Pro) | | |
| 104894472 | NM_152443.2(RDH12): | TCCYCGGTGGCTCACCACATTGG | Leber congenital amaurosis 13 |
| | c.523T > C (p.Ser175Pro) | | |
| 104894587 | NM_004870.3(MPDU1): | TTCCYGGTCATGCACTACAGAGG | Congenital disorder of |
| | c.356T > C (p.Leu119Pro) | | glycosylation type 1F |
| 104894588 | NM_004870.3(MPDU1): | AATAYGGCGGCCGAGGCGGACGG | Congenital disorder of |
| | c.2T > C (p.Met1Thr) | | glycosylation type 1F |
| 104894626 | NM_000304.3(PMP22): | TAGCAAYGGATCGTGGGCAATGG | Charcot-Marie-Tooth disease, |
| | c.82T > C (p.Trp28Arg) | | type IE |
| 104894631 | NM_018129.3(PNPO): | ACCTYAACTCTGGGACCTGCTGG | Pyridoxal 5-phosphate- |
| | c.784T > C (p.Ter262Gln) | | dependent epilepsy |
| 104894703 | NM_032551.4(KISS1R): | GCCCTGCYGTACCCGCTGCCCGG, | |
| | c.305T > C (p.Leu102Pro) | TGCYGTACCCGCTGCCCGGCTGG | |
| 104894826 | NM_000166.5(GJB1): | ATGYCATCAGCGTGGTGTTCCGG | Dejerine-Sottas disease, X- |
| | c.407T > C (p.Val136Ala) | | linked hereditary motor and |
| | | | sensory neuropathy |
| 104894859 | NM_001122606.1(LAMP2): | CAGCTACYGGGATGCCCCCCTGG, | Danon disease |
| | c.961T > C (p.Trp321Arg) | AGCTACYGGGATGCCCCCCTGGG | |
| 104894931 | NM_006517.4(SLC16A2): | TGAGCYGGTGGGCCCAATGCAGG | Allan-Herndon-Dudley |
| | c.1313T > C (p.Leu438Pro) | | syndrome |
| 104894935 | NM_000330.3(RS1): | TTACTTCYCTTTGGCTATGAAGG | Juvenile retinoschisis |
| | c.38T > C (p.Leu13Pro) | | |
| 104895217 | NM_001065.3(TNFRSF1A): | TGCYGTACCAAGTGCCACAAAGG | TNF receptor-associated |
| | c.175T > C (p.Cys59Arg) | | periodic fever syndrome |
| | | | (TRAPS) |
| 143889283 | NM_003793.3(CTSF): | CTCCAYACTGAGCTGTGCCACGG | Ceroid lipofuscinosis, |
| | c.692A > G (p.Tyr231Cys) | | neuronal, 13 |
| 122459147 | NM_001159702.2(FHL1): | GGGGYGCTTCAAGGCCATTGTGG | Myopathy, reducing body, X- |
| | c.310T > C (p.Cys104Arg) | | linked, childhood-onset |
| 74552543 | NM_020184.3(CNNM4): | AAGCTCCYGGACTTTTTTCTGGG | Cone-rod dystrophy |
| | c.971T > C (p.Leu324Pro) | | amelogenesis imperfecta |
| 199476117 | m.10158T > C | AAAYCCACCCCTTACGAGTGCGG | Leigh disease, Leigh syndrome |
| | | | due to mitochondrial complex |
| | | | I deficiency, Mitochondrial |
| | | | complex I deficiency |
| 794727808 | NM_020451.2(SEPN1): | TTCCGGYGAGTGGGCCACACTGG | Congenital myopathy with |
| | c.872 + 2T > C | | fiber type disproportion, |
| | | | Eichsfeld type congenital |
| | | | muscular dystrophy |
| 140547520 | NM_005022.3(PFN1): | CACCTYCTTTGCCCATCAGCAGG | Amyotrophic lateral sclerosis |
| | c.350A > G (p.Glu117Gly) | | 18 |
| 397514359 | NM_000060.3(BTD): | TCACCGCYTCAATGACACAGAGG | Biotinidase deficiency |
| | c.445T > C (p.Phe149Leu) | | |
| 207460001 | m.15197T > C | CTAYCCGCCATCCCATACATTGG | Exercise intolerance |
| 397514406 | NM_000060.3(BTD): | TTCACCCYGGTCCCTGTCTGGGG | Biotinidase deficiency |
| | c.1214T > C (p.Leu405Pro) | | |
| 397514516 | NM_006177.3(NRL): | GAGGCCAYGGAGCTGCTGCAGGG | Retinitis pigmentosa 27 |
| | c.287T > C (p.Met96Thr) | | |
| 72554312 | NM_000531.5(OTC): | CTCACTCYAAAAAACTTTACCGG | Ornithine |
| | c.134T > C (p.Leu45Pro) | | carbamoyltransferase |
| | | | deficiency |
| 397514569 | NM_178012.4(TUBB2B): | GGTCCYGGATGTGGTGAGGAAGG | Polymicrogyria, asymmetric |
| | c.350T > C (p.Leu117Pro) | | |
| 397514571 | NM_000431.3(MVK): | CGGCYTCAACCCCACAGCAATGG, | Porokeratosis, disseminated |
| | c.122T > C (p.Leu41Pro) | GGCYTCAACCCCACAGCAATGGG | superficial actinic 1 |
| 794728390 | NM_000238.3(KCNH2): | GCCATCCYGGGTATGGGGTGGGG, | Cardiac arrhythmia |
| | c.2396T > C (p.Leu799Pro) | CCATCCYGGGTATGGGGTGGGGG, | |
| | | CATCCYGGGTATGGGGTGGGGGG | |
| 397514713 | NM_001199107.1(TBC1D24): | GGTCTYTGACGTCTTCCTGGTGG | Early infantile epileptic |
| | c.686T > C (p.Phe229Ser) | | encephalopathy 16 |
| 397514719 | NM_080605.3(B3GALT6): | CGCYGGCCACCAGCACTGCCAGG | Spondyloepimetaphyseal |
| | c.193A > G (p.Ser65Gly) | | dysplasia with joint laxity |
| 730880608 | NM_000256.3(MYBPC3): | GAGYGCCGCCTGGAGGTGCGAGG | Cardiomyopathy |
| | c.3796T > C (p.Cys1266Arg) | | |
| 397515329 | NM_001382.3(DPAGT1): | AATCCYGTACTATGTCTACATGG, | Congenital disorder of |
| | c.503T > C (p.Leu168Pro) | ATCCYGTACTATGTCTACATGGG, | glycosylation type 1J |
| | | TCCYGTACTATGTCTACATGGGG | |
| 397515465 | NM_018127.6(ELAC2): | ATAYTTTCTGGTCCATTGAAAGG | Combined oxidative |
| | c.460T > C (p.Phe154Leu) | | phosphorylation deficiency 17 |
| 397515557 | NM_005211.3(CSF1R): | CATCTYTGACTGTGTCTACACGG | Hereditary diffuse |
| | c.2483T > C (p.Phe828Ser) | | leukoencephalopathy with |
| | | | spheroids |
| 397515599 | NM_194248.2(OTOF): | AGGTGCYGTTCTGGGGCCTACGG, | Deafness, autosomal recessive |
| | c.3413T > C (p.Leu1138Pro) | GGTGCYGTTCTGGGGCCTACGGG | 9 |
| 397515766 | NM_000138.4(FBN1): | GGACAAYGTAGAAATACTCCTGG | Marfan syndrome |
| | c.2341T > C (p.Cys781Arg) | | |
| 565779970 | NM_001429.3(EP300): | CTTAYTACAGTTACCAGAACAGG | Rubinstein-Taybi syndrome 2 |
| | c.3573T > A (p.Tyr1191Ter) | | |
| 786200938 | NM_080605.3(B3GALT6): | AGCTTCAYGGCGCCCGCGCCGGG, | Spondyloepimetaphyseal |
| | c.1A > G (p.Met1Val) | TCAYGGCGCCCGCGCCGGGCCGG | dysplasia with joint laxity |
| 28942087 | NM_000229.1(LCAT): | ATCTCTCYTGGGGCTCCCTGGGG, | Norum disease |
| | c.698T > C (p.Leu233Pro) | TCTCYTGGGGCTCCCTGGGGTGG | |
| 128621203 | NM_000061.2(BTK): | TCGGCCYGTCCAGGTGAGTGTGG | X-linked agammaglobulinemia |
| | c.1625T > C (p.Leu542Pro) | | with growth hormone |
| | | | deficiency |
| 397515412 | NM_006383.3(CIB2): | CTTCAYCTGCAAGGAGGACCTGG | Deafness, autosomal recessive |
| | c.368T > C (p.Ile123Thr) | | 48 |
| 193929364 | NM_000352.4(ABCC8): | AAGCYGCTAATTGGTAGGTGAGG | Permanent neonatal diabetes |
| | c.404T > C (p.Leu135Pro) | | mellitus |
| 730880872 | NM_000257.3(MYH7): | TCGAGAYCTTCGATGTGAGTTGG, | Cardiomyopathy |
| | c.1400T > C (p.Ile467Thr) | CGAGAYCTTCGATGTGAGTTGGG | |
| 80356474 | NM_002977.3(SCN9A): | AAGATCAYTGGTAACTCAGTAGG, | Primary erythromelalgia |
| | c.2543T > C (p.Ile848Thr) | AGATCAYTGGTAACTCAGTAGGG, | |
| | | GATCAYTGGTAACTCAGTAGGGG | |
| 80356489 | NM_001164277.1(SLC37A4): | GGGCYGGCCCCCATGTGGGAAGG | Glucose-6-phosphate transport |
| | c.352T > C (p.Trp118Arg) | | defect |
| 80356536 | NM_152296.4(ATP1A3): | GCCCYTCCTGCTGTTCATCATGG | Dystonia 12 |
| | c.2338T > C (p.Phe780Leu) | | |
| 80356596 | NM_194248.2(OTOF): | GATGCYGGTGTTCGACAACCTGG | Deafness, autosomal recessive |
| | c.3032T > C (p.Leu1011Pro) | | 9, Auditory neuropathy, |
| | | | autosomal recessive, 1 |
| 80356689 | NM_000083.2(CLCN1): | AGGAGYGCTATTTAGCATCGAGG | Myotonia congenita |
| | c.857T > C (p.Val286Ala) | | |
| 118203884 | m.4409T > C | AGGYCAGCTAAATAAGCTATCGG | Mitochondrial myopathy |
| 587777625 | NM_173596.2(SLC39A5): | AGAACAYGCTGGGGCTTTTGCGG | Myopia 24, autosomal |
| | c.911T > C (p.Met304Thr) | | dominant |
| 587783087 | NM_003159.2(CDKL5): | ATTCYTGGGGAGCTTAGCGATGG | not provided |
| | c.602T > C (p.Leu201Pro) | | |
| 118203951 | NM_013319.2(UBIAD1): | TCTGGCYCCTTTCTCTACACAGG, | Schnyder crystalline corneal |
| | c.511T > C (p.Ser171Pro) | GGCYCCTTTCTCTACACAGGAGG | dystrophy |
| 118204017 | NM_000018.3(ACADVL): | TCGCATCYTCCGGATCTTTGAGG, | Very long chain acyl-CoA |
| | c.1372T > C (p.Phe458Leu) | CGCATCYTCCGGATCTTTGAGGG, | dehydrogenase deficiency |
| | | GCATCYTCCGGATCTTTGAGGGG | |
| 397518466 | NM_000833.4(GRIN2A): | CTAYGGGCAGAGTGGGCTATTGG | Focal epilepsy with speech |
| | c.2T > C (p.Met1Thr) | | disorder with or without |
| | | | mental retardation |
| 118204069 | NM_000237.2(LPL): | GGACYGGCTGTCACGGGCTCAGG | Hyperlipoproteinemia, type I |
| | c.337T > C (p.Trp113Arg) | | |
| 118204080 | NM_000237.2(LPL): | GTGAYTGCAGAGAGAGGACTTGG | Hyperlipoproteinemia, type I |
| | c.755T > C (p.Ile252Thr) | | |
| 118204111 | NM_000190.3(HMBS): | GCTTCGCYGCATCGCTGAAAGGG | Acute intermittent porphyria |
| | c.739T > C (p.Cys247Arg) | | |
| 80357438 | NM_007294.3(BRCA1): | AAATCTYAGAGTGTCCCATCTGG | Familial cancer of breast, |
| | c.65T > C (p.Leu22Ser) | | Breast-ovarian cancer, familial |
| | | | 1, Hereditary cancer- |
| | | | predisposing syndrome |
| 139877390 | NM_001040431.2(COA3): | CCAYCTGGGGAGGTAGGTTCAGG | |
| | c.215A > G (p.Tyr72Cys) | | |
| 793888527 | NM_005859.4(PURA): | GACCAYTGCGCTGCCCGCGCAGG, | not provided, Mental |
| | c.563T > C (p.Ile188Thr) | ACCAYTGCGCTGCCCGCGCAGGG, | retardation, autosomal |
| | | CCAYTGCGCTGCCCGCGCAGGGG | dominant 31 |
| 561425038 | NM_002878.3(RAD51D): | CGCCCAYGTTCCCCGCAGGCCGG | Hereditary cancer-predisposing |
| | c.1A > G (p.Met1Val) | | syndrome |
| 121907934 | NM_024105.3(ALG12): | TCCYGCTGGCCCTCGCGGCCTGG | Congenital disorder of |
| | c.473T > C (p.Leu158Pro) | | glycosylation type 1G |
| 80358207 | NM_153212.2(GJB4): | CCTCATCYTCAAGGCCGCCGTGG | Erythrokeratodermia variabilis |
| | c.409T > C (p.Phe137Leu) | | |
| 80358228 | NM_002353.2(TACSTD2): | TCGGCYGCACCCCAAGTTCGTGG | Lattice corneal dystrophy Type |
| | c.557T > C (p.Leu186Pro) | | III |
| 121908076 | NM_138691.2(TMC1): | AGGACCTYGCTGGGAAACAATGG, | Deafness, autosomal recessive |
| | c.1543T > C (p.Cys515Arg) | ACCTYGCTGGGAAACAATGGTGG, | 7 |
| | | CCTYGCTGGGAAACAATGGTGGG | |
| 121908089 | NM_017838.3(NHP2): | GGAGGCTYACGATGAGTGCCTGG, | Dyskeratosis congenita |
| | c.415T > C (p.Tyr139His) | GGCTYACGATGAGTGCCTGGAGG | autosomal recessive 1, |
| | | | Dyskeratosis congenita, |
| | | | autosomal recessive 2 |
| 121908154 | NM_001243133.1(NLRP3): | GGTGCCTYTGACGAGCACATAGG | Familial cold urticaria, |
| | c.926T > C (p.Phe309Ser) | | Chronic infantile neurological, |
| | | | cutaneous and articular |
| | | | syndrome |
| 121908158 | NM_001033855.2(DCLRE1C): | GGCGCTAYGAGTTCTTTCGAGGG, | Histiocytic medullary |
| | c.2T > C (p.Met1Thr) | GCGCTAYGAGTTCTTTCGAGGGG | reticulosis |
| 796052870 | NM_018129.3(PNPO): | CCCCCAYGACGTGCTGGCTGCGG, | not provided |
| | c.2T > C (p.Met1Thr) | CCCCAYGACGTGCTGGCTGCGGG, | |
| | | CCCAYGACGTGCTGGCTGCGGGG | |
| 121908318 | NM_020427.2(SLURP1): | GCAGCCYGGAGCATGGGCTGTGG | Acroerythrokeratoderma |
| | c.43T > C (p.Trp15Arg) | | |
| 121908352 | NM_022124.5(CDH23): | CTCACCTYCAACATCACTGCGGG | Deafness, autosomal recessive |
| | c.5663T > C (p.Phe1888Ser) | | 12 |
| 121908520 | NM_000030.2(AGXT): | CCTGTACYCGGGCTCCCAGAAGG | Primary hyperoxaluria, type I |
| | c.613T > C (p.Ser205Pro) | | |
| 121908618 | NM_004273.4(CHST3): | CGTGCYGGCCTCGCGCATGGTGG | Spondyloepiphyseal dysplasia |
| | c.920T > C (p.Leu307Pro) | | with congenital joint |
| | | | dislocations |
| 11694 | NM_006432.3(NPC2): | TATTCAGYCTAAAAGCAGCAAGG | Niemann-Pick disease type C2 |
| | c.199T > C (p.Ser67Pro) | | |
| 121908739 | NM_000022.2(ADA): | CCTGCYGGCCAACTCCAAAGTGG | Severe combined |
| | c.320T > C (p.Leu107Pro) | | immunodeficiency due to |
| | | | ADA deficiency |
| 80359022 | NM_000059.3(BRCA2): | TGCYTCTTCAACTAAAATACAGG | Familial cancer of breast, |
| | c.7958T > C (p.Leu2653Pro) | | Breast-ovarian cancer, familial |
| | | | 2 |
| 121908902 | NM_003880.3(WISP3): | AAAATCYGTGCCAAGCAACCAGG, | Progressive pseudorheumatoid |
| | c.232T > C (p.Cys78Arg) | AAATCYGTGCCAAGCAACCAGGG, | dysplasia |
| | | AATCYGTGCCAAGCAACCAGGGG | |
| 121908947 | NM_006892.3(DNMT3B): | CAAGTTCYCCGAGGTGAGTCCGG, | Centromeric instability of |
| | c.808T > C (p.Ser270Pro) | AAGTTCYCCGAGGTGAGTCCGGG, | chromosomes 1,9 and 16 and |
| | | AGTTCYCCGAGGTGAGTCCGGGG | immunodeficiency |
| 121909028 | NM_000492.3(CFTR): | AGCCTYTGGAGTGATACCACAGG | Cystic fibrosis |
| | c.3857T > C (p.Phe1286Ser) | | |
| 121909135 | NM_000085.4(CLCNKB): | CTTTGTCYATGGTGAGTCTGGGG | Bartter syndrome type 3 |
| | c.1294T > C (p.Tyr432His) | | |
| 121909143 | NM_001300.5(KLF6): | GGAGCYGCCCTCGCCAGGGAAGG | |
| | c.506T > C (p.Leu169Pro) | | |
| 121909182 | NM_001089.2(ABCA3): | GCACYTGTGATCAACATGCGAGG | Surfactant metabolism |
| | c.302T > C (p.Leu101Pro) | | dysfunction, pulmonary, 3 |
| 121909200 | NM_000503.5(EYA1): | CACTCYCGCTCATTCACTCCCGG | Melnick-Fraser syndrome |
| | c.1459T > C (p.Ser487Pro) | | |
| 121909247 | NM_004970.2(IGFALS): | GGACYGTGGCTGCCCTCTCAAGG | Acid-labile subunit deficiency |
| | c.1618T > C (p.Cys540Arg) | | |
| 121909253 | NM_005570.3(LMAN1): | AGAYGGCGGGATCCAGGCAAAGG | Combined deficiency of factor |
| | c.2T > C (p.Met1Thr) | | V and factor VIII, 1 |
| 121909385 | NM_000339.2(SLC12A3): | CAACCYGGCCCTCAGCTACTCGG | Familial hypokalemia- |
| | c.1868T > C (p.Leu623Pro) | | hypomagnesemia |
| 121909497 | NM_002427.3(MMP13): | TTCTYCGGCTTAGAGGTGACTGG | Spondyloepimetaphyseal |
| | c.224T > C (p.Phe75Ser) | | dysplasia, Missouri type |
| 121909508 | NM_000751.2(CHRND): | AACCYCATCTCCCTGGTGAGAGG | MYASTHENIC |
| | c.188T > C (p.Leu63Pro) | | SYNDROME, |
| | | | CONGENITAL, 3B, FAST- |
| | | | CHANNEL |
| 121909519 | NM_001100.3(ACTA1): | CGAGCYTCGCGTGGCTCCCGAGG | Nemaline myopathy 3 |
| | c.287T > C (p.Leu96Pro) | | |
| 121909572 | NM_000488.3(SERPINC1): | TGGGTGYCCAATAAGACCGAAGG | Antithrombin III deficiency |
| | c.667T > C (p.Ser223Pro) | | |
| 121909677 | NM_000821.6(GGCX): | TATGTYCTCCTACGTCATGCTGG | Pseudoxanthoma elasticum- |
| | c.896T > C (p.Phe299Ser) | | like disorder with multiple |
| | | | coagulation factor deficiency |
| 121909727 | NM_001018077.1(NR3C1): | CTATTGCYTCCAAACATTTTTGG | Glucocorticoid resistance, |
| | c.2209T > C (p.Phe737Leu) | | generalized |
| 139573311 | NM_000492.3(CFTR): | TTCACYTCTAATGGTGATTATGG, | Cystic fibrosis |
| | c.1400T > C (p.Leu467Pro) | TCACYTCTAATGGTGATTATGGG | |
| 121912441 | NM_000454.4(SOD1): | CATCAYTGGCCGCACACTGGTGG | Amyotrophic lateral sclerosis |
| | c.341T > C (p.Ile114Thr) | | type 1 |
| 121912446 | NM_000454.4(SOD1): | CGTTYGGCTTGTGGTGTAATTGG, | Amyotrophic lateral sclerosis |
| | c.434T > C (p.Leu145Ser) | GTTYGGCTTGTGGTGTAATTGGG | type 1 |
| 121912463 | NM_000213.3(ITGB4): | GGCCAGYGTGTGTGTGAGCCTGG | Epidermolysis bullosa with |
| | c.1684T > C (p.Cys562Arg) | | pyloric atresia |
| 121912492 | NM_002292.3(LAMB2): | CCTCAACYGCGAGCAGTGTCAGG | Nephrotic syndrome, type 5, |
| | c.961T > C (p.Cys321Arg) | | with or without ocular |
| | | | abnormalities |
| 397516659 | NM_001399.4(EDA): | GGCCAYGGGCTACCCGGAGGTGG | Hypohidrotic X-linked |
| | c.2T > C (p.Met1Thr) | | ectodermal dysplasia |
| 111033589 | NM_021044.2(DHH): | GTTGCYGGCGCGCCTCGCAGTGG | 46,XY gonadal dysgenesis, |
| | c.485T > C (p.Leu162Pro) | | complete, dhh-related |
| 111033622 | NM_000206.2(IL2RG): | TGGCYGTCAGTTGCAAAAAAAGG | X-linked severe combined |
| | c.343T > C (p.Cys115Arg) | | immunodeficiency |
| 121912613 | NM_001041.3(SI): | ATGCYGGAGTTCAGTTTGTTTGG | Sucrase-isomaltase deficiency |
| | c.1859T > C (p.Leu620Pro) | | |
| 121912619 | NM_016180.4(SLC45A2): | GAGTTTCYCATCTACGAAAGAGG | Oculocutaneous albinism type |
| | c.1082T > C (p.Leu361Pro) | | 4 |
| 61750581 | NM_000552.3(VWF): | CTGCCYCTGATGAGATCAAGAGG | von Willebrand disease, type |
| | c.4837T > C (p.Ser1613Pro) | | 2a |
| 121912653 | NM_000546.5(TP53): | CATCCYCACCATCATCACACTGG | Li-Fraumeni syndrome 1 |
| | c.755T > C (p.Leu252Pro) | | |
| 111033683 | NM_000155.3(GALT): | AGGTCAYGTGCTTCCACCCCTGG | Deficiency of UDPglucose- |
| | c.386T > C (p.Met129Thr) | | hexose-1-phosphate |
| | | | uridylyltransferase |
| 111033752 | NM_000155.3(GALT): | CAGGAGCYACTCAGGAAGGTGGG | Deficiency of UDPglucose- |
| | c.677T > C (p.Leu226Pro) | | hexose-1-phosphate |
| | | | uridylyltransferase |
| 121912729 | NM_000039.1(APOA1): | GCGCTYGGCCGCGCGCCTTGAGG | Familial visceral amyloidosis, |
| | c.593T > C (p.Leu198Ser) | | Ostertag type |
| 769452 | NM_000041.3(APOE): | AACYGGCACTGGGTCGCTTTTGG | |
| | c.137T > C (p.Leu46Pro) | | |
| 121912762 | NM_016124.4(RHD): | ACACYGTTCAGGTATTGGGATGG | |
| | c.329T > C (p.Leu110Pro) | | |
| 111033824 | NM_000155.3(GALT): | CGCCYGACCACGCCGACCACAGG, | Deficiency of UDPglucose- |
| | c.1138T > C (p.Ter380Arg) | GCCYGACCACGCCGACCACAGGG | hexose-1-phosphate |
| | | | uridylyltransferase |
| 111033832 | NM_000155.3(GALT): | TCCYGCGCTCTGCCACTGTCCGG | Deficiency of UDPglucose- |
| | c.980T > C (p.Leu327Pro) | | hexose-1-phosphate |
| | | | uridylyltransferase |
| 730881974 | NM_000455.4(STK11): | GGGAACCYGCTGCTCACCACCGG, | Hereditary cancer-predisposing |
| | c.545T > C (p.Leu182Pro) | AACCYGCTGCTCACCACCGGTGG | syndrome |
| 1064644 | NM_000157.3(GBA): | GGGYCACTCAAGGGACAGCCCGG | Gaucher disease |
| | c.703T > C (p.Ser235Pro) | | |
| 796052090 | NM_138413.3(HOGA1): | GGACCYGCCTGTGGATGCAGTGG | Primary hyperoxaluria, type III |
| | c.533T > C (p.Leu178Pro) | | |
| 121913141 | NM_000208.2(INSR): | CTACCYGGACGGCAGGTGTGTGG | Leprechaunism syndrome |
| | c.779T > C (p.Leu260Pro) | | |
| 121913272 | NM_006218.2(PIK3CA): | GGAACACYGTCCATTGGCATGGG, | Congenital lipomatous |
| | c.1258T > C (p.Cys420Arg) | GAACACYGTCCATTGGCATGGGG | overgrowth, vascular |
| | | | malformations, and epidermal |
| | | | nevi, Neoplasm of ovary, |
| | | | PIK3CA Related Overgrowth |
| | | | Spectrum |
| 61751310 | NM_000552.3(VWF): | GCTCCYGCTGCTCTCCGACACGG | von Willebrand disease, type |
| | c.8317T > C (p.Cys2773Arg) | | 2a |
| 312262799 | NM_024408.3(NOTCH2): | TTCACAYGTCTGTGCATGCCAGG | Alagille syndrome 2 |
| | c.1438T > C (p.Cys480Arg) | | |
| 121913570 | NM_000426.3(LAMA2): | ATCATTCYTTTGGGAAGTGGAGG, | Merosin deficient congenital |
| | c.7691T > C (p.Leu2564Pro) | TCATTCYTTTGGGAAGTGGAGGG | muscular dystrophy |
| 121913640 | NM_000257.3(MYH7): | AACTCCAYGTATAAGCTGACAGG | Familial hypertrophic |
| | c.1046T > C (p.Met349Thr) | | cardiomyopathy 1, |
| | | | Cardiomyopathy |
| 121913642 | NM_000257.3(MYH7): | CATCATGYCCATCCTGGAAGAGG | Dilated cardiomyopathy 1S |
| | c.1594T > C (p.Ser532Pro) | | |
| 119463996 | NM_001079802.1(FKTN): | GTAGTCTYTCATGAGAGGAGTGG | Limb-girdle muscular |
| | c.527T > C (p.Phe176Ser) | | dystrophy- |
| | | | dystroglycanopathy, type C4 |
| 587776456 | NM_002049.3(GATA1): | GCTCAYGAGGGCACAGAGCATGG | GATA-1-related |
| | c.1240T > C (p.Ter414Arg) | | thrombocytopenia with |
| | | | dyserythropoiesis |
| 63750654 | NM_000184.2(HBG2): | ATGCAAAYATCTGTCTGAAACGG | Fetal hemoglobin quantitative |
| | c.−228T > C | | trait locus 1 |
| 587776519 | NM_001999.3(FBN2): | AGCAYTGCAACCACATTGTCAGG | Congenital contractural |
| | c.3725 − 15A > G | | arachnodactyly |
| 78365220 | NM_000402.4(G6PD): | TGCCCYCCACCTGGGGTCACAGG | Anemia, nonspherocytic |
| | c.473T > C (p.Leu158Pro) | | hemolytic, due to G6PD |
| | | | deficiency |
| 63750741 | NM_000179.2(MSH6): | CTGGGGCYGGTATTCATGAAAGG | Hereditary Nonpolyposis |
| | c.1346T > C (p.Leu449Pro) | | Colorectal Neoplasms |
| 587776914 | NM_017565.3(FAM20A): | GTAATCYGCAAAGGAGGAGAAGG, | Enamel-renal syndrome |
| | c.590 − 2A > G | TAATCYGCAAAGGAGGAGAAGGG | |
| 5030809 | NM_000551.3(VHL): | CCCYACCCAACGCTGCCGCCTGG | Von Hippel-Lindau syndrome, |
| | c.292T > C (p.Tyr98His) | | Hereditary cancer-predisposing |
| | | | syndrome |
| 199476132 | m.5728T > C | CAATCYACTTCTCCCGCCGCCGG, | Cytochrome-c oxidase |
| | | AATCYACTTCTCCCGCCGCCGGG | deficiency, Mitochondrial |
| | | | complex I deficiency |
| 62637012 | NM_014336.4(AIPL1): | CTGCCAGYGCCTGCTGAAGAAGG, | Leber congenital amaurosis 4 |
| | c.715T > C (p.Cys239Arg) | CCAGYGCCTGCTGAAGAAGGAGG | |
| 199476199 | NM_207352.3(CYP4V2): | AAACTGGYCCTTATACCTGTTGG, | Bietti crystalline corneoretinal |
| | c.1021T > C (p.Ser341Pro) | AACTGGYCCTTATACCTGTTGGG | dystrophy |
| 587777183 | NM_006702.4(PNPLA6): | CCTYTAACCGCAGCATCCATCGG | Boucher Neuhauser syndrome |
| | c.3053T > C (p.Phe1018Ser) | | |
| 199476389 | NM_000487.5(ARSA): | GGTCTCTYGCGGTGTGGAAAGGG | Metachromatic leukodystrophy |
| | c.899T > C (p.Leu300Ser) | | |
| 199476398 | NM_016599.4(MYOZ2): | TTAYCCCATCTCAGTAACCGTGG | Familial hypertrophic |
| | c.142T > C (p.Ser48Pro) | | cardiomyopathy 16 |
| 119456967 | NM_001037633.1(SIL1): | TTGCYGAAGGAGCTGAGATGAGG | Marinesco-Sj\xc3\xb6gren |
| | c.1370T > C (p.Leu457Pro) | | syndrome |
| 730882253 | NM_006888.4(CALM1): | GGCAYTCCGAGTCTTTGACAAGG | Long QT syndrome 14 |
| | c.268T > C (p.Phe90Leu) | | |
| 587777283 | NM_012338.3(TSPAN12): | TAATCCAYAATTTGTCATCCTGG | Exudative vitreoretinopathy 5 |
| | c.413A > G (p.Tyr138Cys) | | |
| 587777306 | NM_015884.3(MBTPS2): | GCTYTGCTTTGGATGGACAATGG | Palmoplantar keratoderma, |
| | c.1391T > C (p.Phe464Ser) | | mutilating, with periorificial |
| | | | keratotic plaques, X-linked |
| 56378716 | NM_000250.1(MPO): | TCACTCAYGTTCATGCAATGGGG | Myeloperoxidase deficiency |
| | c.752T > C (p.Met251Thr) | | |
| 587777390 | NM_005026.3(PIK3CD): | GCAGGACYGCCCCATTGCCTGGG | Activated PI3K-delta |
| | c.1246T > C (p.Cys416Arg) | | syndrome |
| 587777480 | NM_003108.3(SOX11): | TATGGYCCAAGATCGAACGCAGG | Mental retardation, autosomal |
| | c.178T > C (p.Ser60Pro) | | dominant 27 |
| 587777663 | NM_001288767.1(ARMC5): | GCCCGACYGCGGGATGCTGGTGG | Acth-independent |
| | c.1379T > C (p.Leu460Pro) | | macronodular adrenal |
| | | | hyperplasia 2 |
| 61753033 | NM_000350.2(ABCA4): | AAGGCYACATGAACTAACCAAGG | Stargardt disease, Stargardt |
| | c.5819T > C (p.Leu1940Pro) | | disease 1, Cone-rod dystrophy |
| | | | 3 |
| 200488568 | NM_002972.3(SBF1): | CAGGCGYCCTCTTGCTCAGCCGG | Charcot-Marie-Tooth disease, |
| | c.4768A > G (p.Thr1590Ala) | | type 4B3 |
| 132630274 | NM_000377.2(WAS): | CGGAGTCYGTTCTCCAGGGCAGG | Severe congenital neutropenia |
| | c.809T > C (p.Leu270Pro) | | X-linked |
| 132630308 | NM_001399.4(EDA): | CTGCYACCTAGAGTTGCGCTCGG | Hypohidrotic X-linked |
| | c.181T > C (p.Tyr61His) | | ectodermal dysplasia |
| 60934003 | NM_170707.3(LMNA): | ACGGCTCYCATCAACTCCACTGG, | Benign scapuloperoneal |
| | c.1589T > C (p.Leu530Pro) | CGGCTCYCATCAACTCCACTGGG, | muscular dystrophy with |
| | | GGCTCYCATCAACTCCACTGGGG | cardiomyopathy |
| 180177160 | NM_000030.2(AGXT): | GGTGCYGCGGATCGGCCTGCTGG, | Primary hyperoxaluria, type I |
| | c.1076T > C (p.Leu359Pro) | GTGCYGCGGATCGGCCTGCTGGG | |
| 180177222 | NM_000030.2(AGXT): | GTGCYGCTGTTCTTAACCCACGG, | Primary hyperoxaluria, type I |
| | c.449T > C (p.Leu150Pro) | TGCYGCTGTTCTTAACCCACGGG | |
| 180177254 | NM_000030.2(AGXT): | GCTCATCYCCTTCAGTGACAAGG | Primary hyperoxaluria, type I |
| | c.661T > C (p.Ser221Pro) | | |
| 180177264 | NM_000030.2(AGXT): | GGGGCYGTGACGACCAGCCCAGG | Primary hyperoxaluria, type I |
| | c.757T > C (p.Cys253Arg) | | |
| 180177293 | NM_000030.2(AGXT): | GTATCYGCATGGGCGCCTGCAGG | Primary hyperoxaluria, type I |
| | c.893T > C (p.Leu298Pro) | | |
| 376785840 | NM_001282227.1(CECR1): | GAAATCAYAGGACAAGCCTTTGG | Polyarteritis nodosa |
| | c.1232A > G (p.Tyr411Cys) | | |
| 587779393 | NM_000257.3(MYH7): | GAGCCYCCAGAGCTTGTTGAAGG | Myopathy, distal, 1 |
| | c.4937T > C (p.Leu1646Pro) | | |
| 587779410 | NM_012434.4(SLC17A5): | ATTGTACYCAGAGCACTAGAAGG | Sialic acid storage disease, |
| | c.500T > C (p.Leu167Pro) | | severe infantile type |
| 587779513 | NM_000090.3(COL3A1): | AGGYAACCCTTAATACTACCTGG | Ehlers-Danlos syndrome, type |
| | c.2337 + 2T > C | | 4 |
| | (p.Gly762_Lys779del) | | |
| 777539013 | NM_020376.3(PNPLA2): | GAACGGYGCGCGGACCCGGGCGG, | Neutral lipid storage disease |
| | c.757 + 2T > C | AACGGYGCGCGGACCCGGGCGGG | with myopathy |
| 34557412 | NM_012452.2(TNFRSF13B): | ACTTCYGTGAGAACAAGCTCAGG | Immunoglobulin A deficiency |
| | c.310T > C (p.Cys104Arg) | | 2, Common variable |
| | | | immunodeficiency 2 |
| 796052970 | NM_001165963.1(SCN1A): | CAAGCTYTGATACCTTCAGTTGG, | not provided |
| | c.1094T > C (p.Phe365Ser) | AAGCTYTGATACCTTCAGTTGGG | |
| 724159989 | NC_012920.1:m.7505T > C | CCTCCAYGACTTTTTCAAAAAGG | Deafness, nonsyndromic |
| | | | sensorineural, mitochondrial |
| 796053222 | NM_014191.3(SCN8A): | CGTCYGATCAAAGGCGCCAAAGG, | not provided |
| | c.4889T > C (p.Leu1630Pro) | GTCYGATCAAAGGCGCCAAAGGG | |
| 118192127 | NM_000540.2(RYR1): | TACTACCYGGACCAGGTGGGTGG, | Central core disease |
| | c.10817T > C | ACTACCYGGACCAGGTGGGTGGG, | |
| | (p.Leu3606Pro) | CTACCYGGACCAGGTGGGTGGGG | |
| 118192170 | NM_000540.2(RYR1): | AGGCAYTGGGGACGAGATCGAGG | Malignant hyperthermia |
| | c.14693T > C | | susceptibility type 1, Central |
| | (p.Ile4898Thr) | | core disease |
| 121917703 | NM_005247.2(FGF3): | GTACGTGYCTGTGAACGGCAAGG, | Deafness with labyrinthine |
| | c.466T > C (p.Ser156Pro) | TACGTGYCTGTGAACGGCAAGGG | aplasia microtia and |
| | | | microdontia (LAMM) |
| 690016549 | NM_005211.3(CSF1R): | CCGCCYGCCTGTGAAGTGGATGG | Hereditary diffuse |
| | c.2450T > C (p.Leu817Pro) | | leukoencephalopathy with |
| | | | spheroids |
| 690016552 | NM_005211.3(CSF1R): | GAATCCCYACCCTGGCATCCTGG | Hereditary diffuse |
| | c.2566T > C (p.Tyr856His) | | leukoencephalopathy with |
| | | | spheroids |
| 121917738 | NM_001098668.2(SFTPA2): | GGAGACTYCCGCTACTCAGATGG, | Idiopathic fibrosing alveolitis, |
| | c.593T > C (p.Phe198Ser) | GAGACTYCCGCTACTCAGATGGG | chronic form |
| 690016559 | NM_005211.3(CSF1R): | AGCCYGTACCCATGGAGGTAAGG, | Hereditary diffuse |
| | c.1957T > C (p.Cys653Arg) | GCCYGTACCCATGGAGGTAAGGG | leukoencephalopathy with |
| | | | spheroids |
| 690016560 | NM_005211.3(CSF1R): | GCAGAYCTGCTCCTTCCTTCAGG | Hereditary diffuse |
| | c.2717T > C (p.Ile906Thr) | | leukoencephalopathy with |
| | | | spheroids |
| 121917769 | NM_003361.3(UMOD): | GGCCACAYGTGTCAATGTGGTGG, | Familial juvenile gout |
| | c.376T > C (p.Cys126Arg) | GCCACAYGTGTCAATGTGGTGGG | |
| 121917773 | NM_003361.3(UMOD): | ATGGCACYGCCAGTGCAAACAGG | Glomerulocystic kidney |
| | c.943T > C (p.Cys315Arg) | | disease with hyperuricemia |
| | | | and isosthenuria |
| 121917818 | NM_007255.2(B4GALT7): | TGCYCTCCAAGCAGCACTACCGG | Ehlers-Danlos syndrome |
| | c.617T > C (p.Leu206Pro) | | progeroid type |
| 121917824 | NM_021615.4(CHST6): | GGACCYGGCGCGGGAGCCGCTGG | Macular corneal dystrophy |
| | c.827T > C (p.Leu276Pro) | | Type I |
| 121917848 | NM_000452.2(SLC10A2): | TTTCYTCTGGCTAGAATTGCTGG | Bile acid malabsorption, |
| | c.728T > C (p.Leu243Pro) | | primary |
| 121918006 | NM_000478.4(ALPL): | TGGACYATGGTGAGACCTCCAGG | Infantile hypophosphatasia |
| | c.1306T > C (p.Tyr436His) | | |
| 121918010 | NM_000478.4(ALPL): | CAAAGGCYTCTTCTTGCTGGTGG, | Infantile hypophosphatasia |
| | c.979T > C (p.Phe327Leu) | GGCYTCTTCTTGCTGGTGGAAGG | |
| 121918088 | NM_000371.3(TTR): | CCCCYACTCCTATTCCACCACGG | |
| | c.400T > C (p.Tyr134His) | | |
| 121918110 | NM_001042465.1(PSAP): | GAAGCYGCCGAAGTCCCTGTCGG | Gaucher disease, atypical, due |
| | c.1055T > C (p.Leu352Pro) | | to saposin C deficiency |
| 121918137 | NM_003730.4(RNASET2): | CCAGYGCCTTCCACCAAGCCAGG | Leukoencephalopathy, cystic, |
| | c.550T > C (p.Cys184Arg) | | without megalencephaly |
| 121918191 | NM_001127628.1(FBP1): | GGAGTYCATTTTGGTGGACAAGG | Fructose-biphosphatase |
| | c.581T > C (p.Phe194Ser) | | deficiency |
| 121918306 | NM_006946.2(SPTBN2): | ACCAAGCYGCTGGATCCCGAAGG, | Spinocerebellar ataxia 5 |
| | c.758T > C (p.Leu253Pro) | AAGCYGCTGGATCCCGAAGGTGG, | |
| | | AGCYGCTGGATCCCGAAGGTGGG | |
| 121918505 | NM_000141.4(FGFR2): | AATGCCYCCACAGTGGTCGGAGG | Pfeiffer syndrome, Neoplasm |
| | c.799T > C (p.Ser267Pro) | | of stomach |
| 121918643 | NM_003126.2(SPTA1): | GTGGAGCYGGTAGCTAAAGAAGG, | Hereditary pyropoikilocytosis, |
| | c.620T > C (p.Leu207Pro) | TGGAGCYGGTAGCTAAAGAAGGG | Elliptocytosis 2 |
| 121918646 | NM_001024858.2(SPTB): | CTCCAGCYGGAAGGATGGCTTGG | Spherocytosis type 2 |
| | c.604T > C (p.Trp202Arg) | | |
| 121918648 | NM_001024858.2(SPTB): | ATGCCYCTGTGGCTGAGGCGTGG | |
| | c.6055T > C (p.Ser2019Pro) | | |
| 727504166 | NM_000543.4(SMPD1): | TGAGGCCYGTGGCCTGCTCCTGG, | Niemann-Pick disease, type A, |
| | c.475T > C (p.Cys159Arg) | GAGGCCYGTGGCCTGCTCCTGGG | Niemann-Pick disease, type B |
| 193922915 | NM_000434.3(NEU1): | CAGCYATGGCCAGGCCCCAGTGG | Sialidosis, type II |
| | c.1088T > C (p.Leu363Pro) | | |
| 727504419 | NM_000501.3(ELN): | CAGGYAACATCTGTCCCAGCAGG, | Supravalvar aortic stenosis |
| | c.889 + 2T > C | AGGYAACATCTGTCCCAGCAGGG | |
| 376395543 | NM_000256.3(MYBPC3): | GAGACYGAAGGGCCAGGTGGAGG | Primary familial hypertrophic |
| | c.26 − 2A > G | | cardiomyopathy, Familial |
| | | | hypertrophic cardiomyopathy |
| | | | 4, Cardiomyopathy |
| 1169305 | NM_000545.6(HNF1A): | GATGCYGGCAGGGTCCTGGCTGG, | Maturity-onset diabetes of the |
| | c.1720G > A (p.Gly574Ser) | ATGCYGGCAGGGTCCTGGCTGGG, | young, type 3 |
| | | TGCYGGCAGGGTCCTGGCTGGGG | |
| 730880130 | NM_000527.4(LDLR): | CTACYGGACCGACTCTGTCCTGG, | Familial hypercholesterolemia |
| | c.1468T > C (p.Trp490Arg) | TACYGGACCGACTCTGTCCTGGG | |
| 281860286 | NM_018713.2(SLC30A10): | GGCGCTTYCGGGGGGCCTCAGGG | Hypermanganesemia with |
| | c.500T > C (p.Phe167Ser) | | dystonia, polycythemia and |
| | | | cirrhosis |
| 730880306 | NM_145693.2(LPIN1): | AAGGYACCGCGGGCCTCGCGCGG, | Myoglobinuria, acute |
| | c.1441 + 2T > C | AGGYACCGCGGGCCTCGCGCGGG | recurrent, autosomal recessive |
| 74315452 | NM_000454.4(SOD1): | TTGCAYCATTGGCCGCACACTGG | Amyotrophic lateral sclerosis |
| | c.338T > C (p.Ile113Thr) | | type 1 |
| 730880455 | NM_000169.2(GLA): | CGCGCYTGCGCTTCGCTTCCTGG | not provided |
| | c.41T > C (p.Leu14Pro) | | |
| 267606656 | NM_054027.4(ANKH): | AGCTCYGTTTCGTGATGTTTTGG | Craniometaphyseal dysplasia, |
| | c.1015T > C (p.Cys339Arg) | | autosomal dominant |
| 267606687 | NM_033409.3(SLC52A3): | AGTTACGYCAAGGTGATGCTGGG | Brown-Vialetto-Van laere |
| | c.1238T > C (p.Val413Ala) | | syndrome |
| 267606721 | NM_001928.2(CFD): | GGTGYGCGGGGGCGTGCTCGAGG, | Complement factor d |
| | c.640T > C (p.Cys214Arg) | GTGYGCGGGGGCGTGCTCGAGGG | deficiency |
| 267606747 | NM_001849.3(COL6A2): | CGCCYGCGACAAGCCACAGCAGG | Ullrich congenital muscular |
| | c.2329T > C (p.Cys777Arg) | | dystrophy |
| 431905515 | NM_001044.4(SLC6A3): | CTGCACCYCCACCAGAGCCATGG | Infantile Parkinsonism- |
| | c.671T > C (p.Leu224Pro) | | dystonia |
| 267606857 | NM_000180.3(GUCY2D): | AGAGAYCGCCAACATGTCACTGG | Cone-rod dystrophy 6 |
| | c.2846T > C (p.Ile949Thr) | | |
| 267606880 | NM_022489.3(INF2): | GCTGCYCCAGATGCCCTCTGTGG | Focal segmental |
| | c.125T > C (p.Leu42Pro) | | glomerulosclerosis 5 |
| 515726191 | NM_015713.4(RRM2B): | AACTCCTYCTACAGCAGCAAAGG | RRM2B-related mitochondrial |
| | c.581A > G (p.Glu194Gly) | | disease |
| 267606917 | NM_004646.3(NPHS1): | GCTGCCGYGCGTGGCCCGAGGGG, | Finnish congenital nephrotic |
| | c.793T > C (p.Cys265Arg) | CTGCCGYGCGTGGCCCGAGGGGG | syndrome |
| 267607104 | NM_001199107.1(TBC1D24): | CAAGTTCYTCCACAAGGTGAGGG, | Myoclonic epilepsy, familial |
| | c.751T > C (p.Phe251Leu) | TTCYTCCACAAGGTGAGGGCCGG | infantile |
| 267607182 | NM_144631.5(ZNF513): | TGGGCGCYGCATGCGAGGAGAGG, | Retinitis pigmentosa 58 |
| | c.1015T > C (p.Cys339Arg) | CGCYGCATGCGAGGAGAGGCTGG | |
| 267607211 | NM_000229.1(LCAT): | TATGACYGGCGGCTGGAGCCCGG | Norum disease |
| | c.508T > C (p.Trp170Arg) | | |
| 267607215 | NM_016269.4(LEF1): | GAACGAGYCTGAAATCATCCCGG | Sebaceous tumors, somatic |
| | c.181T > C (p.Ser61Pro) | | |
| 587783580 | NM_178151.2(DCX): | AAAAAACYCTACACTCTGGATGG | Heterotopia |
| | c.683T > C (p.Leu228Pro) | | |
| 587783644 | NM_004004.5(GJB2): | GATCCYCGTTGTGGCTGCAAAGG | Hearing impairment |
| | c.107T > C (p.Leu36Pro) | | |
| 587783653 | NM_005682.6(ADGRG1): | CCCTGCYCACCTGCCTTTCCTGG | Polymicrogyria, bilateral |
| | c.1460T > C (p.Leu487Pro) | | frontoparietal |
| 587783863 | NM_000252.2(MTM1): | GGAAYCTTTAAAAAAAGTGAAGG | Severe X-linked myotubular |
| | c.958T > C (p.Ser320Pro) | | myopathy |
| 267607751 | NM_000249.3(MLH1): | ATCACGGYAAGAATGGTACATGG, | Hereditary Nonpolyposis |
| | c.453 + 2T > C | TCACGGYAAGAATGGTACATGGG | Colorectal Neoplasms |
| 119103227 | NM_000411.6(HLCS): | CTATCYTTCTCAGGGAGGGAAGG | Holocarboxylase synthetase |
| | c.710T > C (p.Leu237Pro) | | deficiency |
| 119103237 | NM_005787.5(ALG3): | GATTGACYGGAAGGCCTACATGG | Congenital disorder of |
| | c.211T > C (p.Trp71Arg) | | glycosylation type 1D |
| 398122806 | NM_003172.3(SURF1): | CCACYGGCATTATCGAGACCTGG | Congenital myasthenic |
| | c.679T > C (p.Trp227Arg) | | syndrome, acetazolamide- |
| | | | responsive |
| 80338747 | NM_004525.2(LRP2): | GTACCTGYACTGGGCTGACTGGG | Donnai Barrow syndrome |
| | c.7564T > C (p.Tyr2522His) | | |
| 398122838 | NM_001271723.1(FBXO38): | TTCCTYGTATCCCAATGCTAAGG | Distal hereditary motor |
| | c.616T > C (p.Cys206Arg) | | neuronopathy 2D |
| 398122989 | NM_014495.3(ANGPTL3): | ACAAAACYTCAATGAAACGTGGG | Hypobetalipoproteinemia, |
| | c.883T > C (p.Phe295Leu) | | familial, 2 |
| 80338945 | NM_004004.5(GJB2): | GCTCCYAGTGGCCATGCACGTGG | Deafness, autosomal recessive |
| | c.269T > C (p.Leu90Pro) | | 1A, Hearing impairment |
| 80338956 | NM_000334.4(SCN4A): | AAGATCAYTGGCAATTCAGTGGG, | Hyperkalemic Periodic |
| | c.2078T > C (p.Ile693Thr) | AGATCAYTGGCAATTCAGTGGGG, | Paralysis Type 1, |
| | | GATCAYTGGCAATTCAGTGGGGG | Paramyotonia congenita of von |
| | | | Eulenburg |
| 267608131 | NM_000179.2(MSH6): | CGGYAACTAACTAACTATAATGG | Hereditary Nonpolyposis |
| | c.4001 + 2T > C | | Colorectal Neoplasms |
| 587784573 | NM_004963.3(GUCY2C): | TCCCYGTGCTGCTGGAGTTGTGG, | Meconium ileus |
| | c.2782T > C (p.Cys928Arg) | CCCYGTGCTGCTGGAGTTGTGGG | |
| 267608511 | NM_003159.2(CDKL5): | CCAACYTTTTACTATTCAGAAGG | Early infantile epileptic |
| | c.659T > C (p.Leu220Pro) | | encephalopathy 2 |
| 373842615 | NM_000118.3(ENG): | CCGCCYGCGGGGATAAAGCCAGG, | Haemorrhagic telangiectasia 1 |
| | c.1273 − 2A > G | CGCCYGCGGGGATAAAGCCAGGG | |
| 185492581 | NM_000335.4(SCN5A): | GAATCTYCACAGCCGCTCTCCGG | Brugada syndrome |
| | c.376A > G (p.Lys126Glu) | | |
| 200533370 | NM_133499.2(SYN1): | GATGYCTGACGGGTAGCCTGTGG, | Epilepsy, X-linked, with |
| | c.1699A > G (p.Thr567Ala) | ATGYCTGACGGGTAGCCTGTGGG | variable learning disabilities |
| | | | and behavior disorders, not |
| | | | specified |
| 118203981 | NM_148960.2(CLDN19): | GCTCCYGGGCTTCGTGGCCATGG | Hypomagnesemia 5, renal, |
| | c.269T > C (p.Leu90Pro) | | with ocular involvement |
| 137853892 | NM_001235.3(SERPINH1): | GTCGCYAGGGCTCGTGTCGCTGG, | Osteogenesis imperfecta type |
| | c.233T > C (p.Leu78Pro) | TCGCYAGGGCTCGTGTCGCTGGG | 10 |
| 118204024 | NM_000263.3(NAGLU): | GGCCGACYTCTCCGTGTCGGTGG | Mucopolysaccharidosis, MPS- |
| | c.142T > C (p.Phe48Leu) | | III-B |
| 690016563 | NM_005211.3(CSF1R): | CAACCYGCAGTTTGGTGAGATGG | Hereditary diffuse |
| | c.1745T > C (p.Leu582Pro) | | leukoencephalopathy with |
| | | | spheroids |
| 58380626 | NM_000526.4(KRT14): | CGCCACCYACCGCCGCCTGCTGG, | Epidermolysis bullosa |
| | c.1243T > C (p.Tyr415His) | CACCYACCGCCGCCTGCTGGAGG, | herpetiformis, Dowling-Meara |
| | | ACCYACCGCCGCCTGCTGGAGGG | |
| 113994151 | NM_207346.2(TSEN54): | TTGAAGYCTCCCGCGGTGAGCGG, | Pontocerebellar hypoplasia |
| | c.277T > C (p.Ser93Pro) | AAGYCTCCCGCGGTGAGCGGCGG | type 4 |
| 113994206 | NM_004937.2(CTNS): | TGGTCYGAGCTTCGACTTCGTGG | Cystinosis |
| | c.473T > C (p.Leu158Pro) | | |
| 62516109 | NM_000277.1(PAH): | CCACTTCYTGAAAAGTACTGTGG | Phenylketonuria |
| | c.638T > C (p.Leu213Pro) | | |
| 370011798 | NM_001302946.1(TRNT1): | GCAAYTGCAGAAAATGCAAAAGG | Sideroblastic anemia with B- |
| | c.668T > C (p.Ile223Thr) | | cell immunodeficiency, |
| | | | periodic fevers, and |
| | | | developmental delay |
| 62517167 | NM_000277.1(PAH): | AAGATCTYGAGGCATGACATTGG | Mild non-PKU |
| | c.293T > C (p.Leu98Ser) | | hyperphenylalanemia |
| 12021720 | NM_001918.3(DBT): | GACYCACAGAGCCCAATTTCTGG | Intermediate maple syrup urine |
| | c.1150G > A (p.Gly384Ser) | | disease type 2 |
| 104886289 | NM_000495.4(COL4A5): | TCCCCATYGTCCTCAGGGATGGG | Alport syndrome, X-linked |
| | c.4756T > C (p.Cys1586Arg) | | recessive |
| 370471013 | NC_012920.1:m.5559A > G | CAACYTACTGAGGGCTTTGAAGG | Leigh disease |
| 121434215 | NM_000487.5(ARSA): | GCCTTCCYGCCCCCCCATCAGGG | Metachromatic |
| | c.410T > C (p.Leu137Pro) | | leukodystrophy, adult type |
| 386134128 | NM_000096.3(CP): | ACACTACYACATTGCCGCTGAGG | Deficiency of ferroxidase |
| | c.1123T > C (p.Tyr375His) | | |
| 121434275 | NM_001127328.2(ACADM): | GTGCAGAYACTTGGAGGCAATGG | Medium-chain acyl-coenzyme |
| | c.1136T > C (p.Ile379Thr) | | A dehydrogenase deficiency |
| 121434276 | NM_001127328.2(ACADM): | CAGCGAYGTTCAGATACTAGAGG | Medium-chain acyl-coenzyme |
| | c.742T > C (p.Cys248Arg) | | A dehydrogenase deficiency |
| 121434284 | NM_002225.3(IVD): | ATGGGCYAAGCGAGGAGCAGAGG | ISOVALERIC ACIDEMIA, |
| | c.134T > C (p.Leu45Pro) | | TYPE I |
| 121434334 | NM_005908.3(MANBA): | ATTACGYCCAGTCCTACAAATGG, | Beta-D-mannosidosis |
| | c.1513T > C (p.Ser505Pro) | TTACGYCCAGTCCTACAAATGGG, | |
| | | TACGYCCAGTCCTACAAATGGGG | |
| 121434366 | NM_000159.3(GCDH): | CGCCCGGYACGGCATCGCGTGGG, | Glutaric aciduria, type 1 |
| | c.883T > C (p.Tyr295His) | GCCCGGYACGGCATCGCGTGGGG | |
| 60715293 | NM_000424.3(KRT5): | GTTTGCCYCCTTCATCGACAAGG | Epidermolysis bullosa |
| | c.541T > C (p.Ser181Pro) | | herpetiformis, Dowling-Meara |
| 121434409 | NM_001003722.1(GLE1): | AAGGACAYTCCTGTCCCCAAGGG | Lethal arthrogryposis with |
| | c.2051T > C (p.Ile684Thr) | | anterior horn cell disease |
| 121434434 | NM_001287.5(CLCN7): | GGGCCYGCGGCACCTGGTGGTGG | Osteopetrosis autosomal |
| | c.2297T > C (p.Leu766Pro) | | recessive 4 |
| 121434455 | NM_000466.2(PEX1): | GATGACCYTGACCTCATTGCTGG | Zellweger syndrome |
| | c.1991T > C (p.Leu664Pro) | | |
| 199422317 | NM_001099274.1(TINF2): | CTGYTTCCCTTTAGGAATCTCGG | Aplastic anemia |
| | c.862T > C (p.Phe288Leu) | | |
| 104895221 | NM_001065.3(TNFRSF1A): | CTCTTCTYGCACAGTGGACCGGG | TNF receptor-associated |
| | c.349T > C (p.Cys117Arg) | | periodic fever syndrome |
| | | | (TRAPS) |
| 137854459 | NM_000138.4(FBN1): | GGGACAYGTTACAACACCGTTGG | Marfan syndrome |
| | c.4987T > C (p.Cys1663Arg) | | |
| 387907075 | NM_024027.4(COLEC11): | CAGCTGYCCTGCCAGGGCCGCGG, | Carnevale syndrome |
| | c.505T > C (p.Ser169Pro) | AGCTGYCCTGCCAGGGCCGCGGG, | |
| | | GCTGYCCTGCCAGGGCCGCGGGG, | |
| | | CTGYCCTGCCAGGGCCGCGGGGG | |
| 1048095 | NM_000352.4(ABCC8): | TGCYGTCCAAAGGCACCTACTGG | Permanent neonatal diabetes |
| | c.674T > C (p.Leu225Pro) | | mellitus |
| 796065347 | NM_019074.3(DLL4): | GAAYGTCCCCCCAACTTCACCGG | Adams-Oliver syndrome, |
| | c.1168T > C (p.Cys390Arg) | | ADAMS-OLIVER |
| | | | SYNDROME 6 |
| 137852347 | NM_000402.4(G6PD): | AGGGYACCTGGACGACCCCACGG | Anemia, nonspherocytic |
| | c.1054T > C (p.Tyr352His) | | hemolytic, due to G6PD |
| | | | deficiency |
| 74315327 | NM_213653.3(HFE2): | GGACCYCGCCTTCCATTCGGCGG | Hemochromatosis type 2A |
| | c.302T > C (p.Leu101Pro) | | |
| 137852579 | NM_000044.3(AR): | GTCCYGGAAGCCATTGAGCCAGG | |
| | c.2033T > C (p.Leu678Pro) | | |
| 137852636 | NM_001166107.1(HMGCS2): | CCCTCYTCAATGCTGCCAACTGG | mitochondrial 3-hydroxy-3- |
| | c.520T > C (p.Phe174Leu) | | methylglutaryl-CoA synthase |
| | | | deficiency |
| 137852661 | NM_033163.3(FGF8): | TTCCCTGYTCCGGGCTGGCCGGG | Kallmann syndrome 6 |
| | c.118T > C (p.Phe40Leu) | | |
| 121912967 | NM_005215.3(DCC): | AGCCCAYGCCAACAATCCACTGG | |
| | c.503T > C (p.Met168Thr) | | |
| 137852806 | NM_001039523.2(CHRNA1): | TGTGYTCCTTCTGGTCATCGTGG | Myasthenic syndrome, |
| | c.901T > C (p.Phe301Leu) | | congenital, fast-channel |
| 137852850 | NM_182760.3(SUMF1): | GGCGACYCCTTTGTCTTTGAAGG | Multiple sulfatase deficiency |
| | c.463T > C (p.Ser155Pro) | | |
| 137852886 | NM_000158.3(GBE1): | AATGTACYACCAAGAATCAAAGG | Glycogen storage disease, type |
| | c.671T > C (p.Leu224Pro) | | IV, GLYCOGEN STORAGE |
| | | | DISEASE IV, |
| | | | NONPROGRESSIVE |
| | | | HEPATIC |
| 137852911 | NM_000419.3(ITGA2B): | CTGGTGCYTGGGGCTCCTGGCGG | Glanzmann thrombasthenia |
| | c.641T > C (p.Leu214Pro) | | |
| 137852948 | NM_138694.3(PKHD1): | GAGCCCAYTGAAATACGCTCAGG | Polycystic kidney disease, |
| | c.10658T > C | | infantile type |
| | (p.Ile3553Thr) | | |
| 137852964 | NM_024960.4(PANK2): | ATTGACYCAGTCGGATTCAATGG | |
| | c.178T > C (p.Ser60Pro) | | |
| 137853020 | NM_006899.3(IDH3B): | TGCGGCYGAGGTAGGTGGTCTGG, | Retinitis pigmentosa 46 |
| | c.395T > C (p.Leu132Pro) | GCGGCYGAGGTAGGTGGTCTGGG | |
| 137853249 | NM_033500.2(HK1): | GACTTCTYGGCCCTGGATCTTGG, | Hemolytic anemia due to |
| | c.1550T > C (p.Leu517Ser) | TTCTYGGCCCTGGATCTTGGAGG | hexokinase deficiency |
| 137853270 | NM_000444.5(PHEX): | AGCYCCAGAAGCCTTTCTTTTGG | Familial X-linked |
| | c.1664T > C (p.Leu555Pro) | | hypophosphatemic vitamin D |
| | | | refractory rickets |
| 137853325 | NM_003639.4(IKBKG): | TGGAGYGCATTGAGTAGGGCCGG | Hypohidrotic ectodermal |
| | c.1249T > C (p.Cys417Arg) | | dysplasia with immune |
| | | | deficiency, Hyper-IgM |
| | | | immunodeficiency, X-linked, |
| | | | with hypohidrotic ectodermal |
| | | | dysplasia |
| 28932769 | NM_002055.4(GFAP): | GGACCYGCTCAATGTCAAGCTGG | Alexander disease |
| | c.1055T > C (p.Leu352Pro) | | |
| 397507439 | NM_002769.4(PRSS1): | TACCAGGYGTCCCTGAATTCTGG | Hereditary pancreatitis |
| | c.116T > C (p. Val39Ala) | | |
| 387906446 | NM_000132.3(F8): | AAAGAAYCTGTAGATCAAAGAGG | Hereditary factor VIII |
| | c.1729T > C (p.Ser577Pro) | | deficiency disease |
| 387906482 | NM_000133.3(F9): | ACGAACAYCTTCCTCAAATTTGG | Hereditary factor IX deficiency |
| | c.1031T > C (p.Ile344Thr) | | disease |
| 387906508 | NM_000131.4(F7): | GACGTYCTCTGAGAGGACGCTGG | Factor VII deficiency |
| | c.983T > C (p.Phe328Ser) | | |
| 387906532 | NM_001040113.1(MYH11): | GAAGCYGGAGGCGCAGGTGCAGG | Aortic aneurysm, familial |
| | c.3791T > C (p.Leu1264Pro) | | thoracic 4 |
| 387906658 | NM_002465.3(MYBPC1): | CAAACCYATATCCGCAGAGTTGG | Distal arthrogryposis type 1B |
| | c.2566T > C (p.Tyr856His) | | |
| 387906701 | NM_003491.3(NAA10): | TGGCCTTYCCTGGCCCCAGGTGG, | N-terminal acetyltransferase |
| | c.109T > C (p.Ser37Pro) | GGCCTTYCCTGGCCCCAGGTGGG | deficiency |
| 387906717 | NM_000377.2(WAS): | GACTTCAYTGAGGACCAGGGTGG, | Severe congenital neutropenia |
| | c.881T > C (p.Ile294Thr) | ACTTCAYTGAGGACCAGGGTGGG | X-linked |
| 387906809 | NM_000287.3(PEX6): | CTTCYGGGCCGGGACCGTGATGG, | Peroxisome biogenesis |
| | c.1601T > C (p.Leu534Pro) | TTCYGGGCCGGGACCGTGATGGG | disorder 4B |
| 387906965 | NM_024513.3(FYCO1): | CAGCCYGATCCCCATCACTGTGG | Cataract, autosomal recessive |
| | c.4127T > C (p.Leu1376Pro) | | congenital 2 |
| 387906967 | NM_006147.3(IRF6): | GCCYCTACCCTGGGCTCATCTGG | Van der Woude syndrome, |
| | c.65T > C (p.Leu22Pro) | | Popliteal pterygium syndrome |
| 387906982 | NM_025132.3(WDR19): | TCTCACYGCTAGAAAAGACTTGG | Asphyxiating thoracic |
| | c.20T > C (p.Leu7Pro) | | dystrophy 5 |
| 387907072 | NM_032446.2(MEGF10): | GGGCAGYGTACTTGCCGCACTGG | Myopathy, areflexia, |
| | c.2320T > C (p.Cys774Arg) | | respiratory distress, and |
| | | | dysphagia, early-onset, |
| | | | Myopathy, areflexia, |
| | | | respiratory distress, and |
| | | | dysphagia, early-onset, mild |
| | | | variant |
| 137854499 | NM_005502.3(ABCA1): | GAGTYCTTTGCCCTTTTGAGAGG | Familial |
| | c.6026T > C (p.Phe2009Ser) | | hypoalphalipoproteinemia |
| 387907117 | NM_000196.3(HSD11B2): | CCGCCGCYATTACCCCGGCCAGG, | Apparent mineralocorticoid |
| | c.1012T > C (p.Tyr338His) | CGCCGCYATTACCCCGGCCAGGG | excess |
| 387907170 | NM_004453.3(ETFDH): | CCAAAACYCACCTTTCCTGGTGG | |
| | c.1130T > C (p.Leu377Pro) | | |
| 387907205 | NM_033360.3(KRAS): | GGACCAGYACATGAGGACTGGGG, | Cardiofaciocutaneous |
| | c.211T > C (p.Tyr71His) | CCAGYACATGAGGACTGGGGAGG, | syndrome 2 |
| | | CAGYACATGAGGACTGGGGAGGG | |
| 387907240 | NM_024110.4(CARD14): | CAGCAGCYGCAGGAGCACCTGGG | Pityriasis rubra pilaris |
| | c.467T > C (p.Leu156Pro) | | |
| 387907282 | NM_152296.4(ATP1A3): | TGCCATCYCACTGGCGTACGAGG | Alternating hemiplegia of |
| | c.2431T > C (p.Ser811Pro) | | childhood 2 |
| 387907361 | NM_005120.2(MED12): | AGGACYCTGAGCCAGGGGCCCGG | Ohdo syndrome, X-linked |
| | c.3493T > C (p.Ser1165Pro) | | |
| 28933970 | NM_006194.3(PAX9): | GGCCGCYGCCCAACGCCATCCGG | Tooth agenesis, selective, 3 |
| | c.62T > C (p.Leu21Pro) | | |
| 137854472 | NM_000138.4(FBN1): | TGCACYTGCCGTGGGTGCAGAGG | |
| | c.3128A > G (p.Lys1043Arg) | | |
| 727504261 | NM_000257.3(MYH7): | AGCGCYCCTCAGCATCTGCCAGG | Cardiomyopathy, not specified |
| | c.2708A > G (p.Glu903Gly) | | |
| 81002853 | NM_000059.3(BRCA2): | ACCACYGGGGGTAAAAAAAGGGG, | Familial cancer of breast, |
| | c.476 − 2A > G | TACCACYGGGGGTAAAAAAAGGG, | Breast-ovarian cancer, familial |
| | | ATACCACYGGGGGTAAAAAAAGG | 2, Hereditary cancer- |
| | | | predisposing syndrome |
| 119473032 | NM_021020.3(LZTS1): | CCCTYCTCGGAGCCCTGTAGAGG | |
| | c.355A > G (p.Lys119Glu) | | |
| 193922801 | NM_000540.2(RYR1): | TTCYCCTCCACGCTCTCGCCTGG | not provided |
| | c.7043A > G (p.Glu2348Gly) | | |
| 36210419 | NM_000218.2(KCNQ1): | GCCCCTYGGAGCCCACGCAGAGG | Torsades de pointes, Cardiac |
| | c.652A > G (p.Lys218Glu) | | arrhythmia |
| 121964989 | NM_000108.4(DLD): | TTCTCYAAAAGCTTCTGATAAGG | Maple syrup urine disease, |
| | c.1483A > G (p.Arg495Gly) | | type 3 |
| 28936669 | NM_000095.2(COMP): | ATTGYCGTCGTCGTCGTCGCAGG | |
| | c.1418A > G (p.Asp473Gly) | | |
| 28936696 | NM_018488.2(TBX4): | GTACYGTAAGGAAGATTCTCGGG, | Ischiopatellar dysplasia |
| | c.1592A > G (p.Gln531Arg) | GGTACYGTAAGGAAGATTCTCGG | |
| 121965077 | NM_000137.2(FAH): | TCCYGGTCTGACCATTCCCCAGG | Tyrosinemia type I |
| | c.1141A > G (p.Arg381Gly) | | |
| 794728203 | NM_000138.4(FBN1): | ACTCAYCAATATCTGCAAAATGG | Thoracic aortic aneurysms and |
| | c.3344A > G (p.Asp1115Gly) | | aortic dissections |
| 786205436 | NM_003002.3(SDHD): | GAATAGYCCATCGCAGAGCAAGG | Fatal infantile mitochondrial |
| | c.275A > G (p.Asp92Gly) | | cardiomyopathy |
| 72551317 | NM_000784.3(CYP27A1): | AGTCCACYTGGGGAGGAAGGTGG | Cholestanol storage disease |
| | c.776A > G (p.Lys259Arg) | | |
| 786205687 | NM_016218.2(POLK): | ATTCACAYTCTTCAACTTAATGG | Malignant tumor of prostate |
| | c.1385A > G (p.Asn462Ser) | | |
| 794728280 | NM_000138.4(FBN1): | TGTTCAYACTGGAAGCCGGCGGG, | Thoracic aortic aneurysms and |
| | c.7916A > G (p.Tyr2639Cys) | CTGTTCAYACTGGAAGCCGGCGG | aortic dissections |
| 28937317 | NM_000335.4(SCN5A): | GCAYTGACCACCACCTCAAGTGG | Long QT syndrome 3, |
| | c.3971A > G (p.Asn1324Ser) | | Congenital long QT syndrome |
| 786205854 | NM_144499.2(GNAT1): | CGGAGYCCTTCCACAGCCGCTGG | NIGHT BLINDNESS, |
| | c.386A > G (p.Asp129Gly) | | CONGENITAL |
| | | | STATIONARY, TYPE 1G |
| 104893776 | NM_000539.3(RHO): | GGATGYACCTGAGGACAGGCAGG | Retinitis pigmentosa 4 |
| | c.533A > G (p.Tyr178Cys) | | |
| 28937590 | NM_001257342.1(BCS1L): | GACACYGAGGTGCTGAGTACGGG, | GRACILE syndrome |
| | c.232A > G (p.Ser78Gly) | CGACACYGAGGTGCTGAGTACGG | |
| 104893866 | NM_000320.2(QDPR): | TGCCGYACCCGATCATACCTGGG, | Dihydropteridine reductase |
| | c.449A > G (p.Tyr150Cys) | ATGCCGYACCCGATCATACCTGG | deficiency |
| 587776590 | NM_015629.3(PRPF31): | GACAYACCCCTGGGTGGTGGAGG, | Retinitis pigmentosa 11 |
| | c.527 + 3A > G | GCGGACAYACCCCTGGGTGGTGG | |
| 104894015 | NM_000162.3(GCK): | GTAGYAGCAGGAGATCATCGTGG | Hyperinsulinemic |
| | c.641A > G (p.Tyr214Cys) | | hypoglycemia familial 3 |
| 202247823 | NM_000532.4(PCCB): | ATATYTGCATGTTTTCTCCAAGG | Propionic acidemia |
| | c.1606A > G (p.Asn536Asp) | | |
| 104894199 | NM_000073.2(CD3G): | CCAYGTCAGTCTCTGTCCTCCGG | Immunodeficiency 17 |
| | c.1A > G (p.Met1Val) | | |
| 104894208 | NM_001814.4(CTSC): | CTCCYGAGGGCTTAGGATTGGGG, | Papillon-Lef\xc3\xa8vre |
| | c.857A > G (p.Gln286Arg) | CCTCCYGAGGGCTTAGGATTGGG, | syndrome, Haim-Munk |
| | | ACCTCCYGAGGGCTTAGGATTGG | syndrome |
| 104894211 | NM_001814.4(CTSC): | TCCTACAYAGTGGTACTCAGAGG | Papillon-Lef\xc3\xa8vre |
| | c.1040A > G (p.Tyr347Cys) | | syndrome, Periodontitis, |
| | | | aggressive, 1 |
| 104894290 | NM_000448.2(RAG1): | CTGYACTGGCAGAGGGATTCTGG | Histiocytic medullary |
| | c.2735A > G (p.Tyr912Cys) | | reticulosis |
| 104894354 | NM_000217.2(KCNA1): | GCGYTTCCACGATGAAGAAGGGG, | Episodic ataxia type 1 |
| | c.676A > G (p.Thr226Ala) | AGCGYTTCCACGATGAAGAAGGG, | |
| | | CAGCGYTTCCACGATGAAGAAGG | |
| 104894425 | NM_014239.3(EIF2B2): | AGTTGTCYCAATACCTGCTTTGG | Leukoencephalopathy with |
| | c.638A > G (p.Glu213Gly) | | vanishing white matter, |
| | | | Ovarioleukodystrophy |
| 104894450 | NM_000270.3(PNP): | ATAYCTCCAACCTCAAACTTGGG, | Purine-nucleoside |
| | c.383A > G (p.Asp128Gly) | GATAYCTCCAACCTCAAACTTGG | phosphorylase deficiency |
| 147394623 | NM_024887.3(DHDDS): | GGCACTYCTTGGCATAGCGACGG | Retinitis pigmentosa 59 |
| | c.124A > G (p.Lys42Glu) | | |
| 60723330 | NM_005557.3(KRT16): | GCGGTCAYTGAGGTTCTGCATGG | Pachyonychia congenita, type |
| | c.374A > G (p.Asn125Ser) | | 1, Palmoplantar keratoderma, |
| | | | nonepidermolytic, focal |
| 104894634 | NM_030665.3(RAI1): | CTGCTGCYGTCGTCGTCGCTTGG | Smith-Magenis syndrome |
| | c.4685A > G (p.Gln1562Arg) | | |
| 104894730 | NM_000363.4(TNNI3): | CCTYCTTCACCTGCTTGAGGTGG, | Familial restrictive |
| | c.532A > G (p.Lys178Glu) | CCTCCTYCTTCACCTGCTTGAGG | cardiomyopathy 1 |
| 104894816 | NM_002049.3(GATA1): | GTCCTGYCCCTCCGCCACAGTGG | GATA-1-related |
| | c.653A > G (p.Asp218Gly) | | thrombocytopenia with |
| | | | dyserythropoiesis |
| 794726773 | NM_001165963.1(SCN1A): | GTGCCAYACCTGGTGTGGGGAGG | Severe myoclonic epilepsy in |
| | c.1662 + 3A > G | | infancy |
| 104894861 | NM_000202.6(IDS): | AAAGACTYTTCCCACCGACATGG | Mucopolysaccharidosis, MPS- |
| | c.404A > G (p.Lys135Arg) | | II |
| 104894874 | NM_000266.3(NDP): | TGGYGCCTCATGCAGCGTCGAGG | |
| | c.125A > G (p.His42Arg) | | |
| 191205969 | NM_002420.5(TRPM1): | AAGCYCTTAATATCTGTGCATGG | Congenital stationary night |
| | c.296T > C (p.Leu99Pro) | | blindness, type 1C |
| 794727073 | NM_019109.4(ALG1): | TAAACYGCAGAGAGAACCAAGGG, | Congenital disorder of |
| | c.1188 − 2A > G | GTAAACYGCAGAGAGAACCAAGG | glycosylation type 1K |
| 281875236 | NM_001004334.3(GPR179): | CCCACAYATCCATCTGCCTGCGG | Congenital stationary night |
| | c.659A > G (p.Tyr220Cys) | | blindness, type 1E |
| 28939094 | NM_015915.4(ATL1): | CACCCAYCTTCTTCACCCCTCGG | Spastic paraplegia 3 |
| | c.1222A > G (p.Met408Val) | | |
| 281875324 | NM_005359.5(SMAD4): | ATCCATTYCAAAGTAAGCAATGG | Juvenile polyposis syndrome, |
| | c.989A > G (p.Glu330Gly) | | Hereditary cancer-predisposing |
| | | | syndrome |
| 77173848 | NM_000037.3(ANK1): | GGGCCYGGCCCGCACGTCACAGG | Spherocytosis, type 1, |
| | c.−108T > C | | autosomal recessive |
| 150181226 | NM_001159772.1(CANT1): | CGTCYGTACGTGGGCGGCCTGGG, | Desbuquois syndrome |
| | c.671T > C (p.Leu224Pro) | GCGTCYGTACGTGGGCGGCCTGG | |
| 397514253 | NM_000041.3(APOE): | CGCCCYGCGGCCGAGAGGGCGGG, | Familial type 3 |
| | c.237 − 2A > G | GCGCCCYGCGGCCGAGAGGGCGG | hyperlipoproteinemia |
| 397514348 | NM_000060.3(BTD): | GTTCAYAGATGTCAAGGTTCTGG | Biotinidase deficiency |
| | c.278A > G (p.Tyr93Cys) | | |
| 397514415 | NM_000060.3(BTD): | GGCAYACAGCTCTTTGGATAAGG | Biotinidase deficiency |
| | c.1313A > G (p.Tyr438Cys) | | |
| 397514501 | NM_007171.3(POMT1): | GAGCATYCTCTGTTTCAAAGAGG | Limb-girdle muscular |
| | c.430A > G (p.Asn144Asp) | | dystrophy- |
| | | | dystroglycanopathy, type C1 |
| 370382601 | NM_174917.4(ACSF3): | GGCAGCAYTGCACTGACAGGCGG | not provided |
| | c.1A > G (p.Met1Val) | | |
| 72554332 | NM_000531.5(OTC): | AAGGACTYCCCTTGCAATAAAGG | Ornithine |
| | c.238A > G (p.Lys80Glu) | | carbamoyltransferase |
| | | | deficiency |
| 397514599 | NM_033109.4(PNPT1): | GACTYCAGATGTAACTCTTATGG | Deafness, autosomal recessive |
| | c.1424A > G (p.Glu475Gly) | | 70 |
| 397514650 | NM_000108.4(DLD): | GACTCYAGCTATATCTTCACAGG | Maple syrup urine disease, |
| | c.1444A > G (p.Arg482Gly) | | type 3 |
| 397514675 | NM_003156.3(STIM1): | TTCCACAYCCACATCACCATTGG | Myopathy with tubular |
| | c.251A > G (p.Asp84Gly) | | aggregates |
| 794728378 | NM_000238.3(KCNH2): | ATCYTCTCTGAGTTGGTGTTGGG, | Cardiac arrhythmia |
| | c.1913A > G (p.Lys638Arg) | GATCYTCTCTGAGTTGGTGTTGG | |
| 397514711 | NM_002163.2(IRF8): | AACCTCGYCTTCCAAGTGGCTGG | Autosomal dominant |
| | c.238A > G (p.Thr80Ala) | | CD11C+/CD1C+ dendritic cell |
| | | | deficiency |
| 397514729 | NM_000388.3(CASR): | CCCCCTYCTTTTGGGCTCGCTGG | Hypocalcemia, autosomal |
| | c.85A > G (p.Lys29Glu) | | dominant 1, with bartter |
| | | | syndrome |
| 397514743 | NM_022114.3(PRDM16): | GCCGCCGYTTTGGCTGGCACGGG | Left ventricular |
| | c.2447A > G (p.Asn816Ser) | | noncompaction 8 |
| 397514757 | NM_005689.2(ABCB6): | TGGGCYGTTCCAAGACACCAGGG, | Dyschromatosis universalis |
| | c.508A > G (p.Ser170Gly) | GTGGGCYGTTCCAAGACACCAGG | hereditaria 3 |
| 28940313 | NM_152443.2(RDH12): | CACTGCGYAGGTGGTGACCCCGG | Leber congenital amaurosis 13 |
| | c.677A > G (p.Tyr226Cys) | | |
| 794728538 | NM_000218.2(KCNQ1): | GTCTYCTACTCGGTTCAGGCGGG, | Cardiac arrhythmia |
| | c.1787A > G (p.Glu596Gly) | TGTCTYCTACTCGGTTCAGGCGG | |
| 794728569 | NM_000218.2(KCNQ1): | AGGYCTGTGGAGTGCAGGAGAGG | Cardiac arrhythmia |
| | c.605A > G (p.Asp202Gly) | | |
| 794728573 | NM_000218.2(KCNQ1): | GCCYGCAGTGGAGAGAGGAGAGG | Cardiac arrhythmia |
| | c.1515 − 2A > G | | |
| 370874727 | NM_003494.3(DYSF): | CCGCCCYGGAGACACGAAGCTGG | Limb-girdle muscular |
| | c.33492A > G | | dystrophy, type 2B |
| 794728859 | NM_198056.2(SCN5A): | ACCYGTCGAGATAATGGGTCAGG | not provided |
| | c.2788 − 2A > G | | |
| 794728887 | NM_198056.2(SCN5A): | CCTCTGYCATGAAGATGTCCTGG | not provided |
| | c.4462A > G (p.Thr1488Ala) | | |
| 28940878 | NM_000372.4(TYR): | CTCCTGYCCCCGCTCCACGGTGG | Tyrosinase-negative |
| | c.125A > G (p.Asp42Gly) | | oculocutaneous albinism |
| 397515420 | NM_172107.2(KCNQ2): | GCAYGACACTGCAGGGGGGTGGG, | Early infantile epileptic |
| | c.1636A > G (p.Met546Val) | CGCAYGACACTGCAGGGGGGTGG, | encephalopathy 7 |
| | | AACCGCAYGACACTGCAGGGGGG | |
| 397515428 | NM_001410.2(MEGF8): | GACYCCCGTGAAATGATTCCCGG | Carpenter syndrome 2 |
| | c.7099A > G (p.Ser2367Gly) | | |
| 143601447 | NM_201631.3(TGM5): | TCAACCYCACCCTGTACTTCAGG | Peeling skin syndrome, acral |
| | c.122T > C (p.Leu41Pro) | | type |
| 397515519 | NM_000207.2(INS): | GGGCYTTATTCCATCTCTCTCGG | Permanent neonatal diabetes |
| | c.*59A > G | | mellitus |
| 397515523 | NM_000370.3(TTPA): | CAGGYCCAGATCGAAATCCCGGG, | Ataxia with vitamin E |
| | c.191A > G (p.Asp64Gly) | CCAGGYCCAGATCGAAATCCCGG | deficiency |
| 397515891 | NM_000256.3(MYBPC3): | TACTTGCYGTAGAACAGAAGGGG | Familial hypertrophic |
| | c.1224 − 2A > G | | cardiomyopathy 4, |
| | | | Cardiomyopathy |
| 397516082 | NM_000256.3(MYBPC3): | GTCCCYGTGTCCCGCAGTCTAGG | Familial hypertrophic |
| | c.927 − 2A > G | | cardiomyopathy 4, |
| | | | Cardiomyopathy |
| 397516138 | NM_000257.3(MYH7): | TATCAAYGAACTGTCCCTCAGGG, | Familial hypertrophic |
| | c.2206A > G (p.Ile736Val) | CTATCAAYGAACTGTCCCTCAGG | cardiomyopathy 1, |
| | | | Cardiomyopathy, not specified |
| 1154510 | NM_002150.2(HPD): | ATGACGYGGCCTGAATCACAGGG, | 4-Alpha- |
| | c.97G > A (p.Ala33Thr) | AATGACGYGGCCTGAATCACAGG | hydroxyphenylpyruvate |
| | | | hydroxylase deficiency |
| 397516330 | NM_000260.3(MYO7A): | ATATCCYGGGGGAGCAGAAAGGG, | Usher syndrome, type 1 |
| | c.6439 − 2A > G | GATATCCYGGGGGAGCAGAAAGG | |
| 72556271 | NM_000531.5(OTC): | CAGCCCAYTGATAATTGGGATGG | not provided |
| | c.482A > G (p.Asn161Ser) | | |
| 606231260 | NM_023073.3(C5orf42): | ATCYATCAAATACAAAAATTTGG | Orofaciodigital syndrome 6 |
| | c.3290 − 2A > G | | |
| 587777521 | NM_004817.3(TJP2): | CAGCTCYGAGAAGAAACCACGGG, | Progressive familial |
| | c.1992 − 2A > G | TCAGCTCYGAGAAGAAACCACGG | intrahepatic cholestasis 4 |
| 730880846 | NM_000257.3(MYH7): | CTTCYTGCTGCGGTCCCCAATGG | Cardiomyopathy |
| | c.617A > G (p.Lys206Arg) | | |
| 397517978 | NM_206933.2(USH2A): | TTCCCYGTAAGAAAATTAACAGG | Usher syndrome, type 2A, |
| | c.12067 − 2A > G | | Retinitis pigmentosa 39 |
| 606231409 | NM_000216.2(ANOS1): | GCACCAYGGCTGCGGGTCGAGGG, | Kallmann syndrome 1 |
| | c.1A > G (p.Met1Val) | GGCACCAYGGCTGCGGGTCGAGG | |
| 80356546 | NM_003334.3(UBA1): | TGGCYTGTCACCCGGATATGTGG | Arthrogryposis multiplex |
| | c.1639A > G (p.Ser547Gly) | | congenita, distal, X-linked |
| 80356584 | NM_194248.2(OTOF): | GACCYGCAGGCAGGAGAAGGGGG, | Deafness, autosomal recessive |
| | c.766 − 2A > G | TGACCYGCAGGCAGGAGAAGGGG, | 9 |
| | | CTGACCYGCAGGCAGGAGAAGGG, | |
| | | GCTGACCYGCAGGCAGGAGAAGG | |
| 730880930 | NM_000257.3(MYH7): | GGAACAYGCACTCCTCTTCCAGG | Cardiomyopathy |
| | c.1615A > G (p.Met539Val) | | |
| 118203947 | NM_013319.2(UBIAD1): | TCCYGTCATCACTCTTTTTGTGG | Schnyder crystalline corneal |
| | c.355A > G (p.Arg119Gly) | | dystrophy |
| 60171927 | NM_000526.4(KRT14): | GCGGTCAYTGAGGTTCTGCATGG | Epidermolysis bullosa |
| | c.368A > G (p.Asn123Ser) | | herpetiformis, Dowling-Meara |
| 199422248 | NM_001363.4(DKC1): | AATCYTGGCCCCATAGCAGATGG | Dyskeratosis congenita X- |
| | c.941A > G (p.Lys314Arg) | | linked |
| 72558467 | NM_000531.5(OTC): | TCCACTYCTTCTGGCTTTCTGGG, | not provided |
| | c.929A > G (p.Glu310Gly) | ATCCACTYCTTCTGGCTTTCTGG | |
| 72558478 | NM_000531.5(OTC): | ACTTTCYGTTTTCTGCCTCTGGG, | not provided |
| | c.988A > G (p.Arg330Gly) | CACTTTCYGTTTTCTGCCTCTGG | |
| 118204455 | NM_000505.3(F12): | GGTGGYACTGGAAGGGGAAGTGG | |
| | c.158A > G (p.Tyr53Cys) | | |
| 80357477 | NM_007294.3(BRCA1): | TTGYCCTCTGTCCAGGCATCTGG | Familial cancer of breast, |
| | c.5453A > G (p.Asp1818Gly) | | Breast-ovarian cancer, familial |
| | | | 1 |
| 121907908 | NM_024426.4(WT1): | CGCYCTCGTACCCTGTGCTGTGG | Mesothelioma |
| | c.1021A > G (p.Ser341Gly) | | |
| 121907926 | NM_000280.4(PAX6): | GTGGYGCCCGAGGTGCCCATTGG | Optic nerve aplasia, bilateral |
| | c.1171A > G (p.Thr391Ala) | | |
| 121908023 | NM_024740.2(ALG9): | TTAYACAAAACAATGTTGAGTGG | Congenital disorder of |
| | c.860A > G (p.Tyr287Cys) | | glycosylation type 1L |
| 121908148 | NM_001243133.1(NLRP3): | ACAATYCCAGCTGGCTGGGCTGG | Familial cold urticaria |
| | c.1880A > G (p.Glu627Gly) | | |
| 121908166 | NM_006492.2(ALX3): | CGGYTCTGGAACCAGACCTGGGG, | Frontonasal dysplasia 1 |
| | c.608A > G (p.Asn203Ser) | GCGGYTCTGGAACCAGACCTGGG, | |
| | | TGCGGYTCTGGAACCAGACCTGG | |
| 121908184 | NM_020451.2(SEPN1): | CCCAYGGCTGCGGCTGGCGGCGG, | Eichsfeld type congenital |
| | c.1A > G (p.Met1Val) | CGGCCCAYGGCTGCGGCTGGCGG | muscular dystrophy |
| 121908258 | NM_130468.3(CHST14): | AAGTCAYAGTGCACGGCACAAGG | Ehlers-Danlos syndrome, |
| | c.878A > G (p.Tyr293Cys) | | musculocontractural type |
| 121908383 | NM_001128425.1(MUTYH): | AAGCYGCTCTGAGGGCTCCCAGG | Neoplasm of stomach |
| | c.1241A > G (p.Gln414Arg) | | |
| 121908580 | NM_004328.4(BCS1L): | GTGYGATCATGTAATGGCGCCGG | Mitochondrial complex III |
| | c.148A > G (p.Thr50Ala) | | deficiency |
| 121908584 | NM_016417.2(GLRX5): | CCTGACCYTGTCGGAGCTCCGGG | Anemia, sideroblastic, |
| | c.294A > G (p.Gln98=) | | pyridoxine-refractory, |
| | | | autosomal recessive |
| 121908635 | NM_022817.2(PER2): | GCCACACYCTCTGCCTTGCCCGG | Advanced sleep phase |
| | c.1984A > G (p.Ser662Gly) | | syndrome, familial |
| 121908655 | NM_003839.3(TNFRSF11A): | GGGTCYGCATTTGTCCGTGGAGG | Osteopetrosis autosomal |
| | c.508A > G (p.Arg170Gly) | | recessive 7 |
| 29001653 | NM_000539.3(RHO): | CGCTCTYGGCAAAGAACGCTGGG, | Retinitis pigmentosa 4 |
| | c.886A > G (p.Lys296Glu) | GCGCTCTYGGCAAAGAACGCTGG | |
| 56307355 | NM_006502.2(POLH): | AGACTTTYCTGCTTAAAGAAGGG | Xeroderma pigmentosum, |
| | c.1603A > G (p.Lys535Glu) | | variant type |
| 121908919 | NM_002977.3(SCN9A): | CCTTTTCYTGTGTATTTGATTGG | Generalized epilepsy with |
| | c.1964A > G (p.Lys655Arg) | | febrile seizures plus, type 7, |
| | | | not specified |
| 121908939 | NM_006892.3(DNMT3B): | GACACGYCTGTGTAGTGCACAGG | Centromeric instability of |
| | c.2450A > G (p.Asp817Gly) | | chromosomes 1,9 and 16 and |
| | | | immunodeficiency |
| 121909088 | NM_001005360.2(DNM2): | ACTYCTTCTCTTTCTCCTGAGGG, | Charcot-Marie-Tooth disease, |
| | c.1684A > G (p.Lys562Glu) | TACTYCTTCTCTTTCTCCTGAGG | dominant intermediate b, with |
| | | | neutropenia |
| 120074112 | NM_000483.4(APOC2): | GCCCAYAGTGTCCAGAGACCTGG | Apolipoprotein C2 deficiency |
| | c.1A > G (p.Met1Val) | | |
| 121909239 | NM_000314.6(PTEN): | ATAYCACCACACACAGGTAACGG | Macrocephaly/autism |
| | c.755A > G (p.Asp252Gly) | | syndrome |
| 121909251 | NM_198217.2(ING1): | TGGYTGCACAGACAGTACGTGGG, | Squamous cell carcinoma of |
| | c.515A > G (p.Asn172Ser) | CTGGYTGCACAGACAGTACGTGG | the head and neck |
| 121909396 | NM_001174089.1(SLC4A11): | GATCAYCTTCATGTAGGGCAGGG, | Corneal dystrophy and |
| | c.2518A > G (p.Met840Val) | AGATCAYCTTCATGTAGGGCAGG | perceptive deafness |
| 121909533 | NM_000034.3(ALDOA): | CCAYCCAACCCTAAGAGAAGAGG | HNSHA due to aldolase A |
| | c.386A > G (p.Asp129Gly) | | deficiency |
| 128627255 | NM_004006.2(DMD): | TGACCGYGATCTGCAGAGAAGGG, | Dilated cardiomyopathy 3B |
| | c.835A > G (p.Thr279Ala) | CTGACCGYGATCTGCAGAGAAGG | |
| 116929575 | NM_001085.4(SERPINA3): | GCTCAYGAAGAAGATGTTCTGGG, | |
| | c.1240A > G (p.Met414Val) | TGCTCAYGAAGAAGATGTTCTGG | |
| 61748392 | NM_004992.3(MECP2): | CAACYCCACTTTAGAGCGAAAGG | Mental retardation, X-linked, |
| | c.410A > G (p.Glu137Gly) | | syndromic 13 |
| 61748906 | NM_001005741.2(GBA): | CCCACTYGGCTCAAGACCAATGG | Gaucher disease, type 1 |
| | c.667T > C (p.Trp223Arg) | | |
| 199473024 | NM_000238.3(KCNH2): | CTGCYCTCCACGTCGCCCCGGGG, | Sudden infant death syndrome |
| | c.3118A > G (p.Ser1040Gly) | CCTGCYCTCCACGTCGCCCCGGG, | |
| | | GCCTGCYCTCCACGTCGCCCCGG | |
| 794728365 | NM_000238.3(KCNH2): | GGACCYGCACCCGGGGAAGGCGG | Cardiac arrhythmia |
| | c.1129 − 2A > G | | |
| 72556293 | NM_000531.5(OTC): | AGAGCTAYAGTGTTCCTAAAAGG | not provided |
| | c.548A > G (p.Tyr183Cys) | | |
| 111033244 | NM_000441.1(SLC26A4): | TGAATYCCTAAGGAAGAGACTGG | Pendred syndrome, Enlarged |
| | c.1151A > G (p.Glu384Gly) | | vestibular aqueduct syndrome |
| 111033415 | NM_000260.3(MYO7A): | AGCYGCAGGGGCACAGGGATGGG, | Usher syndrome, type 1 |
| | c.1344 − 2A > G | AAGCYGCAGGGGCACAGGGATGG | |
| 121912439 | NM_000454.4(SOD1): | AGAATCTYCAATAGACACATCGG | Amyotrophic lateral sclerosis |
| | c.302A > G (p.Glu101Gly) | | type 1 |
| 111033567 | NM_002769.4(PRSS1): | ATCYTGTCATCATCATCAAAGGG, | Hereditary pancreatitis |
| | c.68A > G (p.Lys23Arg) | GATCYTGTCATCATCATCAAAGG | |
| 121912565 | NM_000901.4(NR3C2): | TCATCYGTTTGCCTGCTAAGCGG | Pseudohypoaldosteronism type |
| | c.2327A > G (p.Gln776Arg) | | 1 autosomal dominant |
| 121912574 | NM_000901.4(NR3C2): | CCGACYCCACCTTGGGCAGCTGG | Pseudohypoaldosteronism type |
| | c.2915A > G (p.Glu972Gly) | | 1 autosomal dominant |
| 121912589 | NM_001173464.1(KIF21A): | ATTCAYATCTGCCTCCATGTTGG | Fibrosis of extraocular |
| | c.2839A > G (p.Met947Val) | | muscles, congenital, 1 |
| 111033661 | NM_000155.3(GALT): | ATTCACCYACCGACAAGGATAGG | Deficiency of UDPglucose- |
| | c.253 − 2A > G | | hexose-1-phosphate |
| | | | uridylyltransferase |
| 111033669 | NM_000155.3(GALT): | GAAGTCGYTGTCAAACAGGAAGG | Deficiency of UDPglucose- |
| | c.290A > G (p.Asn97Ser) | | hexose-1-phosphate |
| | | | uridylyltransferase |
| 111033682 | NM_000155.3(GALT): | TGACCTYACTGGGTGGTGACGGG, | Deficiency of UDPglucose- |
| | c.379A > G (p.Lys127Glu) | ATGACCTYACTGGGTGGTGACGG | hexose-1-phosphate |
| | | | uridylyltransferase |
| 111033786 | NM_000155.3(GALT): | CAGCYGCCAATGGTTCCAGTTGG | Deficiency of UDPglucose- |
| | c.950A > G (p.Gln317Arg) | | hexose-1-phosphate |
| | | | uridylyltransferase |
| 121912765 | NM_001202.3(BMP4): | CCTCCYCCCCAGACTGAAGCCGG | Microphthalmia syndromic 6 |
| | c.278A > G (p.Glu93Gly) | | |
| 121912856 | NM_000094.3(COL7A1): | CACCYTGGGGACACCAGGTCGGG, | Epidermolysis bullosa |
| | c.425A > G (p.Lys142Arg) | TCACCYTGGGGACACCAGGTCGG | dystrophica inversa, autosomal |
| | | | recessive |
| 199474715 | NM_152263.3(TPM3): | CCAACTYACGAGCCACCTACAGG | Congenital myopathy with |
| | c.505A > G (p.Lys169Glu) | | fiber type disproportion |
| 199474718 | NM_152263.3(TPM3): | ATCYCTCAGCAAACTCAGCACGG | Congenital myopathy with |
| | c.733A > G (p.Arg245Gly) | | fiber type disproportion |
| 121912895 | NM_001844.4(COL2A1): | CCTCYCTCACCACGTTGCCCAGG | Spondyloepimetaphyseal |
| | c.2974A > G (p.Arg992Gly) | | dysplasia Strudwick type |
| 121913074 | NM_000129.3(F13A1): | ATAGGCAYAGATATTGTCCCAGG | Factor xiii, a subunit, |
| | c.851A > G (p.Tyr284Cys) | | deficiency of |
| 121913145 | NM_000208.2(INSR): | GCTGYGGCAACAGAGGCCTTCGG | Leprechaunism syndrome |
| | c.707A > G (p.His236Arg) | | |
| 312262745 | NM_025137.3(SPG11): | ACTTAYCCTGGGGAGAAGGATGG | Spastic paraplegia 11, |
| | c.2608A > G (p.Ile870Val) | | autosomal recessive |
| 121913682 | NM_000222.2(KIT): | AGAAYCATTCTTGATGTCTCTGG | Mast cell disease, systemic |
| | c.2459A > G (p.Asp820Gly) | | |
| 587776757 | NM_000151.3(G6PC): | GTTCYTACCACTTAAAGACGAGG | Glycogen storage disease type |
| | c.230 + 4A > G | | 1A |
| 61752063 | NM_000330.3(RS1): | TTCTTCGYGGACTGCAAACAAGG | Juvenile retinoschisis |
| | c.286T > C (p.Trp96Arg) | | |
| 367543065 | NM_024549.5(TCTN1): | AGCAACYGCAGAAAAAAGAGGGG, | Joubert syndrome 13 |
| | c.221 − 2A > G | CAGCAACYGCAGAAAAAAGAGGG | |
| 5030773 | NM_000894.2(LHB): | CCACCYGAGGCAGGGGCGGCAGG | Isolated lutropin deficiency |
| | c.221A > G (p.Gln74Arg) | | |
| 199476092 | NM_000264.3(PTCH1): | CGTTACYGAAACTCCTGTGTAGG | Gorlin syndrome, |
| | c.2479A > G (p.Ser827Gly) | | Holoprosencephaly 7, not |
| | | | specified |
| 398123158 | NM_000117.2(EMD): | CGTTCCCYGAGGCAAAAGAGGGG | not provided |
| | c.450 − 2A > G | | |
| 199476103 | RMRP:n.71A > G | ACTTYCCCCTAGGCGGAAAGGGG, | Metaphyseal |
| | | GACTTYCCCCTAGGCGGAAAGGG, | chondrodysplasia, McKusick |
| | | GGACTTYCCCCTAGGCGGAAAGG | type, Metaphyseal dysplasia |
| | | | without hypotrichosis |
| 5030856 | NM_000277.1(PAH): | CTCYCTGCCACGTAATACAGGGG, | Phenylketonuria, |
| | c.1169A > G (p.Glu390Gly) | ACTCYCTGCCACGTAATACAGGG, | Hyperphenylalaninemia, non- |
| | | AACTCYCTGCCACGTAATACAGG | pku |
| 5030860 | NM_000277.1(PAH): | GGGTCGYAGCGAACTGAGAAGGG, | Phenylketonuria, |
| | c.1241A > G (p.Tyr414Cys) | TGGGTCGYAGCGAACTGAGAAGG | Hyperphenylalaninemia, non- |
| | | | pku |
| 587777055 | NM_020988.2(GNAO1): | GGATGYCCTGCTCGGTGGGCTGG | Early infantile epileptic |
| | c.521A > G (p.Asp174Gly) | | encephalopathy 17 |
| 587777223 | NM_024301.4(FKRP): | CCGCAYGGGGCCGAAGTCTGGGG, | Congenital muscular |
| | c.1A > G (p.Met1Val) | GCCGCAYGGGGCCGAAGTCTGGG, | dystrophy-dystroglycanopathy |
| | | AGCCGCAYGGGGCCGAAGTCTGG | with brain and eye anomalies |
| | | | type A5 |
| 587777479 | NM_003108.3(SOX11): | GTACTTGYAGTCGGGGTAGTCGG | Mental retardation, autosomal |
| | c.347A > G (p.Tyr116Cys) | | dominant 27 |
| 587777496 | NM_020435.3(GJC2): | TTGYTCCCCCCTCGGCCTCAGGG, | Leukodystrophy, |
| | c.−170A > G | ATTGYTCCCCCCTCGGCCTCAGG | hypomyelinating, 2 |
| 587777507 | NM_022552.4(DNMT3A): | CTCCYGGTGCTGAAGGACTTGGG, | Tatton-Brown-rahman |
| | c.1943T > C (p.Leu648Pro) | GCTCCYGGTGCTGAAGGACTTGG | syndrome |
| 587777557 | NM_018400.3(SCN3B): | AATCAYGATGTACATCCTTCTGG | Atrial fibrillation, familial, |
| | c.482T > C (p.Met161Thr) | | 16 |
| 587777569 | NM_001030001.2(RPS29): | GATAYCGGTTTCATTAAGGTAGG | Diamond-Blackfan anemia 13 |
| | c.149T > C (p.Ile50Thr) | | |
| 587777657 | NM_153334.6(SCARF2): | CCACGYGCTGCGCTGGCTGGAGG | Marden Walker like syndrome |
| | c.190T > C (p.Cys64Arg) | | |
| 587777689 | NM_005726.5(TSFM): | ACTTCYCACCGGGTAGCTCCCGG | Combined oxidative |
| | c.57 + 4A > G | | phosphorylation deficiency 3 |
| 796052005 | NM_000255.3(MUT): | GCAYACTGGCGGATGGTCCAGGG, | not provided |
| | c.329A > G (p.Tyr110Cys) | AGCAYACTGGCGGATGGTCCAGG | |
| 587777809 | NM_144596.3(TTC8): | GTTCCYGGAAAGCATTAAGAAGG | Retinitis pigmentosa 51 |
| | c.115 − 2A > G | | |
| 587777878 | NM_000166.5(GJB1): | TAGCAYGAAGACGGTGAAGACGG | X-linked hereditary motor and |
| | c.580A > G (p.Met194Val) | | sensory neuropathy |
| 74315420 | NM_001029871.3(RSPO4): | CGTACYGGCGGATGCCTTCCCGG | Anonychia |
| | c.194A > G (p.Gln65Arg) | | |
| 180177219 | NM_000030.2(AGXT): | AGGCCCYGAGGAAGCAGGGACGG | Primary hyperoxaluria, type I |
| | c.424 − 2A > G | | |
| | (p.Gly_142Gln145del) | | |
| 367610201 | NM_002693.2(POLG): | CTCAYGGCACTTACCTGGGATGG | not provided |
| | c.1808T > C (p.Met603Thr) | | |
| 180177319 | NM_012203.1(GRHPR): | TCACAGCYGCGGGGAAAGGGAGG | Primary hyperoxaluria, type II |
| | c.84 − 2A > G | | |
| 796052068 | NM_000030.2(AGXT): | GGTACCYGGAAGACACGAGGGGG, | Primary hyperoxaluria, type I |
| | c.777 − 2A > G | TGGTACCYGGAAGACACGAGGGG | |
| 61754010 | NM_000552.3(VWF): | TGCCAYTGTAATTCCCACACAGG | von Willebrand disease, type |
| | c.1583A > G (p.Asn528Ser) | | 2a |
| 587778866 | NM_000321.2(RB1): | ATTYCAATGGCTTCTGGGTCTGG | Retinoblastoma |
| | c.1927A > G (p.Lys643Glu) | | |
| 74435397 | NM_006331.7(EMG1): | ATAYCTGGCCGCGCTTCCCCAGG | Bowen-Conradi syndrome |
| | c.257A > G (p.Asp86Gly) | | |
| 796052527 | NM_000156.5(GAMT): | CGCTCAYGCTGCAGGCTGGACGG | not provided |
| | c.1A > G (p.Met1Val) | | |
| 796052637 | NM_172107.2(KCNQ2): | GTACYTGTCCCCGTAGCCAATGG | not provided |
| | c.848A > G (p.Lys283Arg) | | |
| 724159963 | NM_032228.5(FAR1): | GATAYCATACAGGAATGCTGGGG, | Peroxisomal fatty acyl-coa |
| | c.1094A > G (p.Asp365Gly) | AGATAYCATACAGGAATGCTGGG, | reductase 1 disorder |
| | | TAGATAYCATACAGGAATGCTGG | |
| 587779722 | NM_000090.3(COL3A1): | CACCCYAAAGAAGAAGTGGTCGG | Ehlers-Danlos syndrome, type |
| | c.1762 − 2A > G | | 4 |
| | (p.Gly588_Gln605del) | | |
| 118192102 | m.8296A > G | TTTACAGYGGGCTCTAGAGGGGG | Diabetes-deafness syndrome |
| | | | maternally transmitted |
| 727502787 | NM_001077494.3(NFKB2): | CTGYCTTCCTTCACCTCTGCTGG | Common variable |
| | c.2594A > G (p.Asp865Gly) | | immunodeficiency 10 |
| 727503036 | NM_000117.2(EMD): | AGCCYTGGGAAGGGGGGCAGCGG | Emery-Dreifuss muscular |
| | c.266 − 2A > G | | dystrophy 1, X-linked |
| 690016544 | NM_005861.3(STUB1): | GGCCCGGYTGGTGTAATACACGG | Spinocerebellar ataxia, |
| | c.194A > G (p.Asn65Ser) | | autosomal recessive 16 |
| 690016554 | NM_005211.3(CSF1R): | GTATCYGGGAGATAGGACAGAGG | Hereditary diffuse |
| | c.2655 − 2A > G | | leukoencephalopathy with |
| | | | spheroids |
| 118192185 | NM_172107.2(KCNQ2): | GCACCAYGGTGCCTGGCGGGAGG | Benign familial neonatal |
| | c.1A > G (p.Met1Val) | | seizures 1 |
| 121917869 | NM_012064.3(MIP): | AGATCYCCACTGTGGTTGCCTGG | Cataract 15, multiple types |
| | c.401A > G (p.Glu134Gly) | | |
| 121918014 | NM_000478.4(ALPL): | AGGCCCAYTGCCATACAGGATGG | Infantile hypophosphatasia |
| | c.1250A > G (p.Asn417Ser) | | |
| 121918036 | NM_000174.4(GP9): | GCAGYCCACCCACAGCCCCATGG | Bernard-Soulier syndrome |
| | c.110A > G (p.Asp37Gly) | | type C |
| 121918089 | NM_000371.3(TTR): | CGGCAAYGGTGTAGCGGCGGGGG, | Amyloidogenic transthyretin |
| | c.379A > G (p.Ile127Val) | GCGGCAAYGGTGTAGCGGCGGGG | amyloidosis |
| 121918121 | NM_000823.3(GHRHR): | CGACTYGGAGAGACGCCTGCAGG | Isolated growth hormone |
| | c.985A > G (p.Lys329Glu) | | deficiency type 1B |
| 121918333 | NM_015335.4(MED13L): | ATATCAYCTAGAGGGAAGGGGGG, | Transposition of great arteries |
| | c.6068A > G (p.Asp2023Gly) | CATATCAYCTAGAGGGAAGGGGG | |
| 121918605 | NM_001035.2(RYR2): | CGCCAGCYGCATTTCAAAGATGG | Catecholaminergic |
| | c.12602A > G | | polymorphic ventricular |
| | (p.Gln4201Arg) | | tachycardia |
| 587781262 | NM_002764.3(PRPS1): | TAGCAYATTTGCAACAAGCTTGG | Charcot-Marie-Tooth disease, |
| | c.343A > G (p.Met115Val) | | X-linked recessive, type 5, |
| | | | Deafness, high-frequency |
| | | | sensorineural, X-linked |
| 121918608 | NM_001161766.1(AHCY): | GCGGGYACTTGGTGTGGATGAGG | Hypermethioninemia with s- |
| | c.344A > G (p.Tyr115Cys) | | adenosylhomocysteine |
| | | | hydrolase deficiency |
| 121918613 | NM_000702.3(ATP1A2): | CTGYCAGGGTCAGGCACACCTGG | Familial hemiplegic migraine |
| | c.1033A > G (p.Thr345Ala) | | type 2 |
| 587781339 | NM_000535.5(PMS2): | GCAGACCYGCACAAAATACAAGG | Hereditary cancer-predisposing |
| | c.904 − 2A > G | | syndrome |
| 121918691 | NM_001128177.1(THRB): | CTTCAYGTGCAGGAAGCGGCTGG | Thyroid hormone resistance, |
| | c.1324A > G (p.Met442Val) | | generalized, autosomal |
| | | | dominant |
| 121918692 | NM_001128177.1(THRB): | CCACCTYCATGTGCAGGAAGCGG | Thyroid hormone resistance, |
| | c.1327A > G (p.Lys443Glu) | | generalized, autosomal |
| | | | dominant |
| 727504333 | NM_000256.3(MYBPC3): | CCGTTCYGTGGGTATAGAGTGGG, | Familial hypertrophic |
| | c.2906 − 2A > G | GCCGTTCYGTGGGTATAGAGTGG | cardiomyopathy 4 |
| 730880805 | NM_000257.3(MYH7): | GCCCYCCTCGTGCTCCAGGGAGG, | Cardiomyopathy |
| | c.4664A > G (p.Glu1555Gly) | CTTGCCCYCCTCGTGCTCCAGGG | |
| 267606834 | NM_138387.3(G6PC3): | TGATCAYGCAGTGTCCAGAAGGG, | Dursun syndrome |
| | c.346A > G (p.Met116Val) | GTGATCAYGCAGTGTCCAGAAGG | |
| 267606851 | NM_000175.3(GPI): | GTACYGGTCATAGGGCAGCATGG | Hemolytic anemia, |
| | c.1028A > G (p.Gln343Arg) | | nonspherocytic, due to glucose |
| | | | phosphate isomerase |
| | | | deficiency |
| 515726182 | NM_015713.4(RRM2B): | TTCCTTCYGGACAGCAGAAGAGG | RRM2B-related mitochondrial |
| | c.190T > C (p.Trp64Arg) | | disease |
| 730881002 | NM_002880.3(RAF1): | GCTGCYGCCCTCGCACCACTGGG, | Rasopathy |
| | c.1279A > G (p.Ser427Gly) | GGCTGCYGCCCTCGCACCACTGG | |
| 267607030 | NM_002977.3(SCN9A): | AAGCTCYGAGGTCCTGGGGGAGG | Primary erythromelalgia |
| | c.29A > G (p.Gln10Arg) | | |
| 267607048 | NM_007373.3(SHOC2): | TACYCATGGTGACTCAAGCCTGG | Noonan-like syndrome with |
| | c.4A > G (p.Ser2Gly) | | loose anagen hair, Rasopathy |
| 587783486 | NM_004380.2(CREBBP): | GCAGCCCYAGGAAGTCCAGAAGG | Rubinstein-Taybi syndrome |
| | c.3983 − 2A > G | | |
| 730881357 | NM_000051.3(ATM): | AGCCYACGGGAAAAGAACTGTGG | Hereditary cancer-predisposing |
| | c.3154 − 2A > G | | syndrome |
| 398122404 | NM_001256864.1(DNAJC6): | AGGTATCYGAAACAGAAGGTTGG | Parkinson disease 19, juvenile- |
| | c.801 − 2A > G | | onset |
| 267607482 | NM_001927.3(DES): | GAATCGTYCTGCAGGAGAGGGGG | Myofibrillar myopathy 1 |
| | c.1024A > G (p.Asn342Asp) | | |
| 796053439 | NM_000391.3(TPP1): | CAGGTACYGCACATCTAGACTGG | not provided |
| | c.833A > G (p.Gln278Arg) | | |
| 587783835 | NM_000252.2(MTM1): | GTTATTCYCCAATGGTGATTGGG | Severe X-linked myotubular |
| | c.550A > G (p.Arg184Gly) | | myopathy |
| 587783842 | NM_000252.2(MTM1): | TCATCAYCTGAGGCACGATACGG | Severe X-linked myotubular |
| | c.629A > G (p.Asp210Gly) | | myopathy |
| 267607777 | NM_000249.3(MLH1): | TGCTACAYTACCTGAGGTACAGG | Hereditary Nonpolyposis |
| | c.884 + 4A > G | | Colorectal Neoplasms |
| 33972047 | NM_000518.4(HBB): | CACGYTCACCTTGCCCCACAGGG, | alpha Thalassemia |
| | c.59A > G (p.Asn20Ser) | CCACGYTCACCTTGCCCCACAGG | |
| 730882004 | NM_000546.5(TP53): | ACACAYGTAGTTGTAGTGGATGG | Li-Fraumeni syndrome, |
| | c.709A > G (p.Met237Val) | | Hereditary cancer- |
| | | | predisposing syndrome |
| 730882052 | NM_001231.4(CASQ1): | GGCTTGYCTGGGATGGTCACAGG | Myopathy, vacuolar, with |
| | c.731A > G (p.Asp244Gly) | | casq1 aggregates |
| 80338959 | NM_000334.4(SCN4A): | GATCAYGATGGTGATGTCGAAGG | Hyperkalemic Periodic |
| | c.4078A > G (p.Met1360Val) | | Paralysis Type 1 |
| 80338960 | NM_000334.4(SCN4A): | CCATCAYGGTGACCATGTTGAGG | Hyperkalemic Periodic |
| | c.4108A > G (p.Met1370Val) | | Paralysis Type 1 |
| 80338962 | NM_000334.4(SCN4A): | TGTACAYGTTGACCACGATGAGG | Hyperkalemic Periodic |
| | c.4774A > G (p.Met1592Val) | | Paralysis Type 1, Familial |
| | | | hyperkalemic periodic |
| | | | paralysis |
| 398123062 | NM_012160.4(FBXL4): | TATGYCCAGCTGCTGTAACCTGG | Mitochondrial DNA depletion |
| | c.1694A > G (p.Asp565Gly) | | syndrome 13 |
| | | | (encephalomyopathic type) |
| 730882140 | NM_001039550.1(DNAJB2): | GATCTCGYAGTAGGATGCCATGG | Charcot-Marie-Tooth disease, |
| | c.14A > G (p.Tyr5Cys) | | Charcot-Marie-Tooth disease, |
| | | | axonal, type 2T |
| 796053522 | NM_052859.3(RFT1): | GCAYCACAAAATTGTACCTGGGG, | Congenital disorder of |
| | c.1222A > G (p.Met408Val) | AGCAYCACAAAATTGTACCTGGG, | glycosylation type 1N |
| | | CAGCAYCACAAAATTGTACCTGG | |
| 398123211 | NM_000169.2(GLA): | AACCYGTATGAGAAAACAATGGG, | Fabry disease |
| | c.548 − 2A > G | TAACCYGTATGAGAAAACAATGG | |
| 587784423 | NM_006306.3(SMC1A): | AGCCYGTGCAAACAGGGGAATGG | Congenital muscular |
| | c.616 − 2A > G | | hypertrophy-cerebral |
| | | | syndrome |
| 398123411 | NM_000487.5(ARSA): | GGCTCYGGGGGCAGAGTCAGGGG, | Metachromatic |
| | c.1108 − 2A > G | GGGCTCYGGGGGCAGAGTCAGGG, | leukodystrophy |
| | | AGGGCTCYGGGGGCAGAGTCAGG | |
| 398123429 | NM_000512.4(GALNS): | CCGCCAYCAGCGTGTCGCCACGG | Mucopolysaccharidosis, MPS- |
| | c.1171A > G (p.Met391 Val) | | IV-A |
| 267608500 | NM_003159.2(CDKL5): | ATGYCCACGGACTTTCCATAGGG, | Early infantile epileptic |
| | c.578A > G (p.Asp193Gly) | CATGYCCACGGACTTTCCATAGG | encephalopathy 2 |
| 398123552 | NM_000402.4(G6PD): | ACACACAYATTCATCATCATGGG | Anemia, nonspherocytic |
| | c.188T > C (p.Ile63Thr) | | hemolytic, due to G6PD |
| | | | deficiency |
| 75391579 | NM_000155.3(GALT): | TTACCYGGCAGTGGGGGTGGGGG, | Deficiency of UDPglucose- |
| | c.563A > G (p.Gln188Arg) | CTTACCYGGCAGTGGGGGTGGGG, | hexose-1-phosphate |
| | | CCTTACCYGGCAGTGGGGGTGGG | uridylyltransferase |
| 398123639 | NM_001848.2(COL6A1): | TTCTCCCYGGAACACAAAACAGG | Ullrich congenital muscular |
| | c.805 − 2A > G | | dystrophy, Bethlem myopathy |
| 398123750 | NM_003482.3(KMT2D): | GCAGTTCYGTGGGGGAATGAAGG | Kabuki make-up syndrome |
| | c.5645 − 2A > G | | |
| 398124528 | NM_144997.5(FLCN): | CCCACYGGGGAGAAGGGCAGGGG, | Hereditary cancer- |
| | c.1433 − 2A > G | GCCCACYGGGGAGAAGGGCAGGG, | predisposing syndrome |
| | | GGCCCACYGGGGAGAAGGGCAGG | |
| 113994149 | NM_025265.3(TSEN2): | CAGAGCAYAGACCAAGAAAAAGG | Pontocerebellar hypoplasia |
| | c.926A > G (p.Tyr309Cys) | | type 2B |
| 281865052 | NM_198578.3(LRRK2): | TCAACAYAATATTTCTAGGCAGG | Parkinson disease 8, autosomal |
| | c.5605A > G (p.Met1869Val) | | dominant |
| 281865495 | NM_004614.4(TK2): | AAGYCTCAGGATTGGTCCGAAGG | Mitochondrial DNA depletion |
| | c.562A > G (p.Thr188Ala) | | syndrome 2 |
| 786200910 | NM_006204.3(PDE6C): | CTTTCYGTTGAAATAAGGATGGG, | Achromatopsia 5 |
| | c.1483 − 2A > G | TCTTTCYGTTGAAATAAGGATGG | |
| 281860296 | NM_000551.3(VHL): | GGTCTTYCTGCACATTTGGGTGG | Von Hippel-Lindau syndrome |
| | c.586A > T (p.Lys196Ter) | | |
| 730880444 | NM_000169.2(GLA): | GTGAACCYGAAATGAGAGGGAGG | not provided |
| | c.370 − 2A > G | | |
| 756328339 | NM_003494.3(DYSF): | CTAYACTCCCAGCCTGGGGGAGG, | Limb-girdle muscular |
| | c.3041A > G (p.Tyr1014Cys) | ATGCTAYACTCCCAGCCTGGGGG, | dystrophy, type 2B |
| | | GATGCTAYACTCCCAGCCTGGGG | |
| 387906810 | NM_153427.2(PITX2): | TCTYGAACCAAACCTGGGGGCGG, | Axenfeld-Rieger syndrome |
| | c.262A > G (p.Lys88Glu) | GATTCTYGAACCAAACCTGGGGG, | type 1 |
| | | CGATTCTYGAACCAAACCTGGGG | |
| 78310959 | NM_030964.3(SPRY4): | AGTGCYTGTCCAGCTCGGGTGGG, | Hypogonadotropic |
| | c.530A > G (p.Lys177Arg) | AAGTGCYTGTCCAGCTCGGGTGG | hypogonadism 17 with or |
| | | | without anosmia |
| 144109267 | NM_207352.3(CYP4V2): | TTCCYGGGGCCAGCAGAGAAGGG, | Bietti crystalline corneoretinal |
| | c.1393A > G (p.Arg465Gly) | GTTCCYGGGGCCAGCAGAGAAGG | dystrophy |
| 104886319 | NM_000495.4(COL4A5): | CACCYGAGTAAGATAAAGAAAGG | Alport syndrome, X-linked |
| | c.1340 − 2A > G | | recessive |
| 104886416 | NM_000495.4(COL4A5): | ACCCYAAAAGAAGCCATCAATGG | Alport syndrome, X-linked |
| | c.466 − 2A > G | | recessive |
| 121434443 | NM_004984.2(KIF5A): | GAACAYAGCTTTTCTGGGGGAGG | Spastic paraplegia 10 |
| | c.827A > G (p.Tyr276Cys) | | |
| 199422314 | NM_001099274.1(TINF2): | TGACTGYGGGGCGCTCCTTATGG | Dyskeratosis congenita |
| | c.850A > G (p.Thr284Ala) | | autosomal dominant |
| 121434478 | NM_004044.6(ATIC): | AGTGTACYTGACAGCAATGGTGG | AICAR transformylase/IMP |
| | c.1277A > G (p.Lys426Arg) | | cyclohydrolase deficiency |
| 111033765 | NM_000155.3(GALT): | CGCYCAGCAGGGGTCAGCTCAGG | Deficiency of UDPglucose- |
| | c.812A > G (p.Glu271Gly) | | hexose-1-phosphate |
| | | | uridylyltransferase |
| 121434606 | NM_006006.4(ZBTB16): | GATCAYGGCCGAGTAGTCCCGGG, | Skeletal defects, genital |
| | c.1849A > G (p.Met617Val) | TGATCAYGGCCGAGTAGTCCCGG | hypoplasia, and mental |
| | | | retardation |
| 566325901 | NM_000017.3(ACADS): | AGCCCAYGCCGCCCAGGATCTGG | not provided |
| | c.1108A > G (p.Met370Val) | | |
| 148665132 | NM_012079.5(DGAT1): | ACCGCGGYGAGGACCTCTGTGGG | Diarrhea 7 |
| | c.751 + 2T > C | | |
| 111033830 | NM_000155.3(GALT): | TGCYGGCCCATACCTGTCAAGGG, | Deficiency of UDPglucose- |
| | c.574A > G (p.Ser192Gly) | CTGCYGGCCCATACCTGTCAAGG | hexose-1-phosphate |
| | | | uridylyltransferase |
| 28933679 | NM_000132.3(F8): | GAGYGCACATCTTTTTCCTAGGG, | Hereditary factor VIII |
| | c.5600A > G (p.His1867Arg) | TGAGYGCACATCTTTTTCCTAGG | deficiency disease |
| 137852251 | NM_000133.3(F9): | GCTGCAYTGTAGTTGTGGTGAGG | Hereditary factor IX deficiency |
| | c.917A > G (p.Asn306Ser) | | disease |
| 141686175 | NM_001287223.1(SCN11A): | CGTGCGCYGTCCCAGTTTGAAGG | Episodic pain syndrome, |
| | c.3473T > C (p.Leu1158Pro) | | familial, 3 |
| 137852331 | NM_000402.4(G6PD): | ATGCGGTYCCAGCCTCTGCTGGG | Favism, susceptibility to, |
| | c.583A > G (p.Asn195Asp) | | Anemia, nonspherocytic |
| | | | hemolytic, due to G6PD |
| | | | deficiency |
| 137852369 | NM_000132.3(F8): | TAGCCATYGATTGCTGGAGAAGG | Hereditary factor VIII |
| | c.5821A > G (p.Asn1941Asp) | | deficiency disease |
| 137852389 | NM_000132.3(F8): | TCAYATTCAGCTCCTATAGCAGG | Hereditary factor VIII |
| | c.398A > G (p.Tyr133Cys) | | deficiency disease |
| 137852406 | NM_000132.3(F8): | TGAGCAGYAAGGAAAGTTATTGG | Hereditary factor VIII |
| | c.940A > G (p.Thr314Ala) | | deficiency disease |
| 28931576 | NM_000041.3(APOE): | ACAGTGYCTGCACCCAGCGCAGG | |
| | c.178A > G (p.Thr60Ala) | | |
| 74315301 | NM_000396.3(CTSK): | GAGYCACATCTTGGGGAAGCTGG | Pyknodysostosis |
| | c.990A > G (p.Ter330Trp) | | |
| 137852540 | NM_002764.3(PRPS1): | TAGCATAYTTGCAACAAGCTTGG | Phosphoribosylpyrophosphate |
| | c.341A > G (p.Asn114Ser) | | synthetase superactivity |
| 137852624 | NM_000215.3(JAK3): | AATCCTGYACAGCAGGACTTGGG | Severe combined |
| | c.299A > G (p.Tyr100Cys) | | immunodeficiency, autosomal |
| | | | recessive, T cell-negative, B |
| | | | cell-positive, NK cell-negative |
| 137852640 | NM_001166107.1(HMGCS2): | ACCACCGYAGCAGGCATTGGTGG | mitochondrial 3-hydroxy-3- |
| | c.500A > G (p.Tyr167Cys) | | methylglutaryl-CoA synthase |
| | | | deficiency |
| 137852814 | NM_005633.3(SOS1): | GCATCCYTTCCAGTGTACTCCGG | Noonan syndrome, Noonan |
| | c.1654A > G (p.Arg552Gly) | | syndrome 4, Rasopathy |
| 137852865 | NM_001171993.1(HPD): | CCTCAYATCCAGGCAAGAATTGG | 4-Hydroxyphenylpyruvate |
| | c.362A > G (p.Tyr121Cys) | | dioxygenase deficiency |
| 370898981 | NM_138691.2(TMC1): | TGGCCYACCAGATCATGCCTTGG | Deafness, autosomal recessive |
| | c.1763 + 3A > G | | 7 |
| 118192167 | NM_000540.2(RYR1): | CCATAYACCAGCCCAGGTACAGG | Malignant hyperthermia |
| | c.14387A > G | | susceptibility type 1, Central |
| | (p.Tyr4796Cys) | | core disease |
| 137852972 | NM_032667.6(BSCL2): | CGAGACAYTGGCAACAGGGAAGG | Distal hereditary motor |
| | c.263A > G (p.Asn88Ser) | | neuronopathy type 5, Silver |
| | | | spastic paraplegia syndrome, |
| | | | Charcot-Marie-Tooth disease, |
| | | | type 2 |
| 118192193 | NM_172107.2(KCNQ2): | CTTCYCATACTCCTTGATGGTGG, | Benign familial neonatal |
| | c.356A > G (p.Glu119Gly) | GCTCTTCYCATACTCCTTGATGG | seizures 1 |
| 118192201 | NM_172107.2(KCNQ2): | GGATCAYCCGCAGAATCTGCAGG | Benign familial neonatal |
| | c.622A > G (p.Met208Val) | | seizures 1 |
| 137853027 | NM_001080463.1(DYNC2H1): | ATAYCTCTAATTACATCAGGTGG, | Short-rib thoracic dysplasia 3 |
| | c.9044A > G | AGAATAYCTCTAATTACATCAGG | with or without polydactyly |
| | (p.Asp3015Gly) | | |
| 137853197 | NM_144573.3(NEXN): | ATAYACTCTCCTCCATCTTCTGG | Dilated cardiomyopathy 1CC, |
| | c.1955A > G (p.Tyr652Cys) | | Cardiomyopathy, not specified |
| 137853203 | NM_000476.2(AK1): | TTCTCAYAGAAGGCGATGACGGG, | Adenylate kinase deficiency, |
| | c.491A > G (p.Tyr164Cys) | TTTCTCAYAGAAGGCGATGACGG | hemolytic anemia due to |
| 786200859 | NM_000308.2(CTSA): | TCCCAYACCTGTTCCCCAGAAGG | Galactosialidosis, adult |
| | c.746 + 3A > G | | |
| 786200897 | NM_003494.3(DYSF): | CAGCYAGAAGACACAGGGAGGGG, | Limb-girdle muscular |
| | c.1285 − 2A > G | ACAGCYAGAAGACACAGGGAGGG, | dystrophy, type 2B |
| | | CACAGCYAGAAGACACAGGGAGG | |
| 786200928 | NM_206933.2(USH2A): | CTCTTAYCTTGGGAAAGGAGAGG | Usher syndrome, type 2A |
| | c.7595 − 2144A > G | | |
| 137853322 | NM_003639.4(IKBKG): | CCAYATCAGGGGCCTGATACTGG | Incontinentia pigmenti |
| | c.1219A > G (p.Met407Val) | | syndrome |
| 387906267 | NM_000022.2(ADA): | CCCCYGGGAAGGGAAGAAAGGGG, | Severe combined |
| | c.219 − 2A > G | GCCCCYGGGAAGGGAAGAAAGGG, | immunodeficiency due to |
| | | AGCCCCYGGGAAGGGAAGAAAGG | ADA deficiency |
| 387906362 | NM_000492.3(CFTR): | TCAAATCYCACCCTCTGGCCAGG | Cystic fibrosis |
| | c.3717 + 4A > G | | |
| 397507442 | NM_002769.4(PRSS1): | CTTGYCATCATCATCAAAGGGGG, | Hereditary pancreatitis |
| | c.65A > G (p.Asp22Gly) | TCTTGYCATCATCATCAAAGGGG, | |
| | | ATCTTGYCATCATCATCAAAGGG, | |
| | | GATCTTGYCATCATCATCAAAGG | |
| 137853971 | NM_024598.3(USB1): | CCACCYGGTTTTCTCTTGATTGG | Poikiloderma with neutropenia |
| | c.502A > G (p.Arg168Gly) | | |
| 2228063 | NM_000067.2(CA2): | TGTYCTTCAGTGGCTGAGCTGGG, | |
| | c.754A > G (p.Asn252Asp) | CTGTYCTTCAGTGGCTGAGCTGG | |
| 387906743 | NM_001376.4(DYNC1H1): | ATTCAAGYAGATTACCTGATTGG | Spinal muscular atrophy, lower |
| | c.2909A > G (p.Tyr970Cys) | | extremity predominant 1, |
| | | | autosomal dominant |
| 387906772 | NM_002052.4(GATA4): | TCCGCAYTGCAAGAGGCCTGGGG, | Atrial septal defect 2 |
| | c.928A > G (p.Met310Val) | TTCCGCAYTGCAAGAGGCCTGGG | |
| 387906825 | NM_000414.3(HSD17B4): | TGCCACAYACTCTGGCTTCAGGG | Gonadal dysgenesis with |
| | c.650A > G (p.Tyr217Cys) | | auditory dysfunction, |
| | | | autosomal recessive |
| | | | inheritance |
| 387906895 | NM_006587.3(CORIN): | GGATAACYTGTACTGTTGTAGGG | Preeclampsia/eclampsia 5 |
| | c.1414A > G (p.Ser472Gly) | | |
| 387906957 | NM_016013.3(NDUFAF1): | ACCYTGACCTCCTGCCAGTAGGG, | Mitochondrial complex I |
| | c.758A > G (p.Lys253Arg) | TACCYTGACCTCCTGCCAGTAGG | deficiency |
| 28933682 | NM_000132.3(F8): | TAGCCAYTGATTGCTGGAGAAGG | Hereditary factor VIII |
| | c.5822A > G (p.Asn1941Ser) | | deficiency disease |
| 387907135 | NM_016464.4(TMEM138): | CAGYACAACACTGCTGCTGTGGG, | Joubert syndrome 16 |
| | c.389A > G (p.Tyr130Cys) | GCAGYACAACACTGCTGCTGTGG | |
| 137854530 | NM_001077488.3(GNAS): | GCCCAYGGCGGCGGCGGCGGCGG | Pseudohypoparathyroidism |
| | c.1A > G (p.Met1Val) | | type 1A |
| 387907176 | NM_018105.2(THAP1): | CCTCACTYGTGGAAAGAAACGGG | Dystonia 6, torsion |
| | c.70A > G (p.Lys24Glu) | | |
| 137854593 | NM_000397.3(CYBB): | TCACAYCTTTCTCCTCATCATGG | Chronic granulomatous |
| | c.1499A > G (p.Asp500Gly) | | disease, X-linked |
| 387907226 | NM_000076.2(CDKN1C): | CGCTYGGCGAAGAAATCTGCGGG, | Intrauterine growth retardation, |
| | c.832A > G (p.Lys278Glu) | GCGCTYGGCGAAGAAATCTGCGG | metaphyseal dysplasia, adrenal |
| | | | hypoplasia congenita, and |
| | | | genital anomalies |
| 387907242 | NM_022912.2(REEP1): | TCCYGTCAAAGGAAAAACAGAGG | Distal hereditary motor |
| | c.304 − 2A > G | | neuronopathy type 5B |
| 387907291 | NM_022787.3(NMNAT1): | TGTYTCTCTGCAAAGGGGCCAGG | Leber congenital amaurosis 9 |
| | c.817A > G (p.Asn273Asp) | | |
| 387907576 | NM_001287.5(CLCN7): | TGTCAYAGTCCAAGCTCTGCAGG | Osteopetrosis autosomal |
| | c.296A > G (p.Tyr99Cys) | | dominant type 2, Osteopetrosis |
| | | | autosomal recessive 4 |
| 730880531 | NM_000256.3(MYBPC3): | GTACCYGGGTGGGGGCCGCAGGG, | Familial hypertrophic |
| | c.1227 − 2A > G | TGTACCYGGGTGGGGGCCGCAGG | cardiomyopathy 4, |
| | | | Cardiomyopathy |
| 267606643 | NM_013411.4(AK2): | TCAYCTTTCATGGGCTCTTTTGG | Reticular dysgenesis |
| | c.494A > G (p.Asp165Gly) | | |
| 267606705 | NM_005188.3(CBL): | TATTTYACATAGTTGGAATGTGG | Noonan syndrome-like |
| | c.1144A > G (p.Lys382Glu) | | disorder with or without |
| | | | juvenile myelomonocytic |
| | | | leukemia |
| 62642934 | NM_000277.1(PAH): | GGCCAAYTTCCTGTAATTGGGGG, | Phenylketonuria, |
| | c.916A > G (p.Ile306Val) | AGGCCAAYTTCCTGTAATTGGGG | Hyperphenylalaninemia, non- |
| | | | pku |
| 267606782 | NM_000117.2(EMD): | TCCAYGGCGGGTGCGGGCTCAGG | Emery-Dreifuss muscular |
| | c.1A > G (p.Met1Val) | | dystrophy, X-linked |
| 267606820 | NM_014053.3(FLVCR1): | AGGCGTYGACCAGCGAGTACAGG | Posterior column ataxia with |
| | c.361A > G (p.Asn121Asp) | | retinitis pigmentosa |

[0325] In some embodiments, any of the base editors provided herein may be used to treat a disease or disorder. For example, any base editors provided herein may be used to correct one or more mutations associated with any of the diseases or disorders provided herein. Exemplary diseases or disorders that may be treated include, without limitation, 3-Methylglutaconic aciduria type 2, 46,XY gonadal dysgenesis, 4-Alpha-hydroxyphenylpyruvate hydroxylase deficiency, 6-pyruvoyl-tetrahydropterin synthase deficiency, achromatopsia, Acid-labile subunit deficiency, Acrodysostosis, acroerythrokeratoderma, ACTH resistance, ACTH-independent macronodular adrenal hyperplasia, Activated PI3K-delta syndrome, Acute intermittent porphyria, Acute myeloid leukemia, Adams-Oliver syndrome 1/5/6, Adenylosuccinate lyase deficiency, Adrenoleukodystrophy, Adult neuronal ceroid lipofuscinosis, Adult onset ataxia with oculomotor apraxia, Advanced sleep phase syndrome, Age-related macular degeneration, Alagille syndrome, Alexander disease, Allan-Herndon-Dudley syndrome, Alport syndrome, X-linked recessive, Alternating hemiplegia of childhood, Alveolar capillary dysplasia with misalignment of pulmonary veins, Amelogenesis imperfecta, Amyloidogenic transthyretin amyloidosis, Amyotrophic lateral sclerosis, Anemia (nonspherocytic hemolytic, due to G6PD deficiency), Anemia (sideroblastic, pyridoxine-refractory, autosomal recessive), Anonychia, Antithrombin III deficiency, Aortic aneurysm, Aplastic anemia, Apolipoprotein C2 deficiency, Apparent mineralocorticoid excess, Aromatase deficiency, Arrhythmogenic right ventricular cardiomyopathy, Familial hypertrophic cardiomyopathy, Hypertrophic cardiomyopathy, Arthrogryposis multiplex congenital, Aspartylglycosaminuria, Asphyxiating thoracic dystrophy, Ataxia with vitamin E deficiency, Ataxia (spastic), Atrial fibrillation, Atrial septal defect, atypical hemolytic-uremic syndrome, autosomal dominant CD11C+/CD1C+dendritic cell deficiency, Autosomal dominant progressive external ophthalmoplegia with mitochondrial DNA deletions, Baraitser-Winter syndrome, Bartter syndrome, Basa ganglia calcification, Beckwith-Wiedemann syndrome, Benign familial neonatal seizures, Benign scapuloperoneal muscular dystrophy, Bernard Soulier syndrome, Beta thalassemia intermedia, Beta-D-mannosidosis, Bietti crystalline corneoretinal dystrophy, Bile acid malabsorption, Biotinidase deficiency, Borjeson-Forssman-Lehmann syndrome, Boucher Neuhauser syndrome, Bowen-Conradi syndrome, Brachydactyly, Brown-Vialetto-Van laere syndrome, Brugada syndrome, Cardiac arrhythmia, Cardiofaciocutaneous syndrome, Cardiomyopathy, Carnevale syndrome, Carnitine palmitoyltransferase II deficiency, Carpenter syndrome, Cataract, Catecholaminergic polymorphic ventricular tachycardia, Central core disease, Centromeric instability of chromosomes 1,9 and 16 and immunodeficiency, Cerebral autosomal dominant arteriopathy, Cerebro-oculo-facio-skeletal syndrome, Ceroid lipofuscinosis, Charcot-Marie-Tooth disease, Cholestanol storage disease, Chondrocalcinosis, Chondrodysplasia, Chronic progressive multiple sclerosis, Coenzyme Q10 deficiency, Cohen syndrome, Combined deficiency of factor V and factor VIII, Combined immunodeficiency, Combined oxidative phosphorylation deficiency, Combined partial 17-alpha-hydroxylase/17,20-lyase deficiency, Complement factor d deficiency, Complete combined 17-alpha-hydroxylase/17,20-lyase deficiency, Cone-rod dystrophy, Congenital contractural arachnodactyly, Congenital disorder of glycosylation, Congenital lipomatous overgrowth, Neoplasm of ovary, PIK3CA Related Overgrowth Spectrum, Congenital long QT syndrome, Congenital muscular dystrophy, Congenital muscular hypertrophy-cerebral syndrome, Congenital myasthenic syndrome, Congenital myopathy with fiber type disproportion, Eichsfeld type congenital muscular dystrophy, Congenital stationary night blindness, Corneal dystrophy, Cornelia de Lange syndrome, Craniometaphyseal dysplasia, Crigler Najjar syndrome, Crouzon syndrome, Cutis laxa with osteodystrophy, Cyanosis, Cystic fibrosis, Cystinosis, Cytochrome-c oxidase deficiency, Mitochondrial complex I deficiency, D-2-hydroxyglutaric aciduria, Danon disease, Deafness with labyrinthine aplasia microtia and microdontia (LAMM), Deafness, Deficiency of acetyl-CoA acetyltransferase, Deficiency of ferroxidase, Deficiency of UDPglucose-hexose-1-phosphate uridylyltransferase, Dejerine-Sottas disease, Desbuquois syndrome, DFNA, Diabetes mellitus type 2, Diabetes-deafness syndrome, Diamond-Blackfan anemia, Diastrophic dysplasia, Dihydropteridine reductase deficiency, Dihydropyrimidinase deficiency, Dilated cardiomyopathy, Disseminated atypical mycobacterial infection, Distal arthrogryposis, Distal hereditary motor neuronopathy, Donnai Barrow syndrome, Duchenne muscular dystrophy, Becker muscular dystrophy, Dyschromatosis universalis hereditaria, Dyskeratosis congenital, Dystonia, Early infantile epileptic encephalopathy, Ehlers-Danlos syndrome, Eichsfeld type congenital muscular dystrophy, Emery-Dreifuss muscular dystrophy, Enamel-renal syndrome, Epidermolysis bullosa dystrophica inversa, Epidermolysis bullosa herpetiformis, Epilepsy, Episodic ataxia, Erythrokeratodermia variabilis, Erythropoietic protoporphyria, Exercise intolerance, Exudative vitreoretinopathy, Fabry disease, Factor V deficiency, Factor VII deficiency, Factor xiii deficiency, Familial adenomatous polyposis, breast cancer, ovarian cancer, cold urticarial, chronic infantile neurological, cutaneous and articular syndrome, hemiplegic migraine, hypercholesterolemia, hypertrophic cardiomyopathy, hypoalphalipoproteinemia, hypokalemia-hypomagnesemia, juvenile gout, hyperlipoproteinemia, visceral amyloidosis, hypophosphatemic vitamin D refractory rickets, FG syndrome, Fibrosis of extraocular muscles, Finnish congenital nephrotic syndrome, focal epilepsy, Focal segmental glomerulosclerosis, Frontonasal dysplasia, Frontotemporal dementia, Fructose-biphosphatase deficiency, Gamstorp-Wohlfart syndrome, Ganglioside sialidase deficiency, GATA-1-related thrombocytopenia, Gaucher disease, Giant axonal neuropathy, Glanzmann thrombasthenia, Glomerulocystic kidney disease, Glomerulopathy, Glucocorticoid resistance, Glucose-6-phosphate transport defect, Glutaric aciduria, Glycogen storage disease, Gorlin syndrome, Holoprosencephaly, GRACILE syndrome, Haemorrhagic telangiectasia, Hemochromatosis, Hemoglobin H disease, Hemolytic anemia, Hemophagocytic lymphohistiocytosis, Carcinoma of colon, Myhre syndrome, leukoencephalopathy, Hereditary factor IX deficiency disease, Hereditary factor VIII deficiency disease, Hereditary factor XI deficiency disease, Hereditary fructosuria, Hereditary Nonpolyposis Colorectal Neoplasm, Hereditary pancreatitis, Hereditary pyropoikilocytosis, Elliptocytosis, Heterotaxy, Heterotopia, Histiocytic medullary reticulosis, Histiocytosis-lymphadenopathy plus syndrome, HNSHA due to aldolase A deficiency, Holocarboxylase synthetase deficiency, Homocysteinemia, Howel-Evans syndrome, Hydatidiform mole, Hypercalciuric hypercalcemia, Hyperimmunoglobulin D, Mevalonic aciduria, Hyperinsulinemic hypoglycemia, Hyperkalemic Periodic Paralysis, Paramyotonia congenita of von Eulenburg, Hyperlipoproteinemia, Hypermanganesemia, Hypermethioninemia, Hyperphosphatasemia, Hypertension, hypomagnesemia, Hypobetalipoproteinemia, Hypocalcemia, Hypogonadotropic hypogonadism, Hypogonadotropic hypogonadism, Hypohidrotic ectodermal dysplasia, Hyper-IgM immunodeficiency, Hypohidrotic X-linked ectodermal dysplasia, Hypomagnesemia, Hypoparathyroidism, Idiopathic fibrosing alveolitis, Immunodeficiency, Immunoglobulin A deficiency, Infantile hypophosphatasia, Infantile Parkinsonism-dystonia, Insulin-dependent diabetes mellitus, Intermediate maple syrup urine disease, Ischiopatellar dysplasia, Islet cell hyperplasia, Isolated growth hormone deficiency, Isolated lutropin deficiency, Isovaleric acidemia, Joubert syndrome, Juvenile polyposis syndrome, Juvenile retinoschisis, Kallmann syndrome, Kartagener syndrome, Kugelberg-Welander disease, Lattice corneal dystrophy, Leber congenital amaurosis, Leber optic atrophy, Left ventricular noncompaction, Leigh disease, Mitochondrial complex I deficiency, Leprechaunism syndrome, Arthrogryposis, Anterior horn cell disease, Leukocyte adhesion deficiency, Leukodystrophy, Leukoencephalopathy, Ovarioleukodystrophy, L-ferritin deficiency, Li-Fraumeni syndrome, Limb-girdle muscular dystrophy-dystroglycanopathy, Loeys-Dietz syndrome, Long QT syndrome, Macrocephaly/autism syndrome, Macular corneal dystrophy, Macular dystrophy, Malignant hyperthermia susceptibility, Malignant tumor of prostate, Maple syrup urine disease, Marden Walker like syndrome, Marfan syndrome, Marie Unna hereditary hypotrichosis, Mast cell disease, Meconium ileus, Medium-chain acyl-coenzyme A dehydrogenase deficiency, Melnick-Fraser syndrome, Mental retardation, Merosin deficient congenital muscular dystrophy, Mesothelioma, Metachromatic leukodystrophy, Metaphyseal chondrodysplasia, Methemoglobinemia, methylmalonic aciduria, homocystinuria, Microcephaly, chorioretinopathy, lymphedema, Microphthalmia, Mild non-PKU hyperphenylalanemia, Mitchell-Riley syndrome, mitochondrial 3-hydroxy-3-methylglutaryl-CoA synthase deficiency, Mitochondrial complex I deficiency, Mitochondrial complex III deficiency, Mitochondrial myopathy, Mucolipidosis III, Mucopolysaccharidosis, Multiple sulfatase deficiency, Myasthenic syndrome, Mycobacterium tuberculosis, Myeloperoxidase deficiency, Myhre syndrome, Myoclonic epilepsy, Myofibrillar myopathy, Myoglobinuria, Myopathy, Myopia, Myotonia congenital, Navajo neurohepatopathy, Nemaline myopathy, Neoplasm of stomach, Nephrogenic diabetes insipidus, Nephronophthisis, Nephrotic syndrome, Neurofibromatosis, Neutral lipid storage disease, Niemann-Pick disease, Non-ketotic hyperglycinemia, Noonan syndrome, Noonan syndrome-like disorder, Norum disease, Macular degeneration, N-terminal acetyltransferase deficiency, Oculocutaneous albinism, Oculodentodigital dysplasia, Ohdo syndrome, Optic nerve aplasia, Ornithine carbamoyltransferase deficiency, Orofaciodigital syndrome, Osteogenesis imperfecta, Osteopetrosis, Ovarian dysgenesis, Pachyonychia, Palmoplantar keratoderma, nonepidermolytic, Papillon-Lef\c3\xa8vre syndrome, Haim-Munk syndrome, Periodontitis, Peeling skin syndrome, Pendred syndrome, Peroxisomal fatty acyl-coa reductase 1 disorder, Peroxisome biogenesis disorder, Pfeiffer syndrome, Phenylketonuria, Phenylketonuria, Hyperphenylalaninemia, non-PKU, Pituitary hormone deficiency, Pityriasis rubra pilaris, Polyarteritis nodosa, Polycystic kidney disease, Polycystic lipomembranous osteodysplasia, Polymicrogyria, Pontocerebellar hypoplasia, Porokeratosis, Posterior column ataxia, Primary erythromelalgia, hyperoxaluria, Progressive familial intrahepatic cholestasis, Progressive pseudorheumatoid dysplasia, Propionic acidemia, Pseudohermaphroditism, Pseudohypoaldosteronism, Pseudoxanthoma elasticum-like disorder, Purine-nucleoside phosphorylase deficiency, Pyridoxal 5-phosphate-dependent epilepsy, Renal dysplasia, retinal pigmentary dystrophy, cerebellar ataxia, skeletal dysplasia, Reticular dysgenesis, Retinitis pigmentosa, Usher syndrome, Retinoblastoma, Retinopathy, RRM2B-related mitochondrial disease, Rubinstein-Taybi syndrome, Schnyder crystalline corneal dystrophy, Sebaceous tumor, Severe congenital neutropenia, Severe myoclonic epilepsy in infancy, Severe X-linked myotubular myopathy, onychodysplasia, facial dysmorphism, hypotrichosis, Short-rib thoracic dysplasia, Sialic acid storage disease, Sialidosis, Sideroblastic anemia, Small fiber neuropathy, Smith-Magenis syndrome, Sorsby fundus dystrophy, Spastic ataxia, Spastic paraplegia, Spermatogenic failure, Spherocytosis, Sphingomyelin/cholesterol lipidosis, Spinocerebellar ataxia, Split-hand/foot malformation, Spondyloepimetaphyseal dysplasia, Platyspondylic lethal skeletal dysplasia, Squamous cell carcinoma of the head and neck, Stargardt disease, Sucrase-isomaltase deficiency, Sudden infant death syndrome, Supravalvar aortic stenosis, Surfactant metabolism dysfunction, Tangier disease, Tatton-Brown-rahman syndrome, Thoracic aortic aneurysms and aortic dissections, Thrombophilia, Thyroid hormone resistance, TNF receptor-associated periodic fever syndrome (TRAPS), Tooth agenesis, Torsades de pointes, Transposition of great arteries, Treacher Collins syndrome, Tuberous sclerosis syndrome, Tyrosinase-negative oculocutaneous albinism, Tyrosinase-positive oculocutaneous albinism, Tyrosinemia, UDPglucose-4-epimerase deficiency, Ullrich congenital muscular dystrophy, Bethlem myopathy Usher syndrome, UV-sensitive syndrome, Van der Woude syndrome, popliteal pterygium syndrome, Very long chain acyl-CoA dehydrogenase deficiency, Vesicoureteral reflux, Vitreoretinochoroidopathy, Von Hippel-Lindau syndrome, von Willebrand disease, Waardenburg syndrome, Warsaw breakage syndrome, WFS1-Related Disorders, Wilson disease, Xeroderma pigmentosum, X-linked agammaglobulinemia, X-linked hereditary motor and sensory neuropathy, X-linked severe combined immunodeficiency, and Zellweger syndrome.

[0326] The development of nucleobase editing advances both the scope and effectiveness of genome editing. The nucleobase editors described here offer researchers a choice of editing with virtually no indel formation (NBE2), or more efficient editing with a low frequency (here, typically ≤1%) of indel formation (NBE3). That the product of base editing is, by definition, no longer a substrate likely contributes to editing efficiency by preventing subsequent product transformation, which can hamper traditional Cas9 applications. By removing the reliance on double-stranded DNA cleavage and stochastic DNA repair processes that vary greatly by cell state and cell type, nucleobase editing has the potential to expand the type of genome modifications that can be cleanly installed, the efficiency of these modifications, and the type of cells that are amenable to editing. It is likely that recent engineered Cas9 variants^{69,70,82} or delivery methods⁷¹ with improved DNA specificity, as well as Cas9 variants with altered PAM specificities,⁷² can be integrated into this strategy to provide additional nucleobase editors with improved DNA specificity or that can target an even wider range of disease-associated mutations. These findings also suggest that engineering additional fusions of dCas9 with enzymes that catalyze additional nucleobase transformations will increase the fraction of the possible DNA base changes that can be made through nucleobase editing. These results also suggest architectures for the fusion of other DNA-modifying enzymes, including methylases and demathylases, that mau enable additional types of programmable genome and epigenome base editing.

### Materials and Methods

[0327] Cloning. DNA sequences of all constructs and primers used in this paper are listed in the Supplementary Sequences. Plasmids containing genes encoding NBE1, NBE2, and NBE3 will be available from Addgene. PCR was performed using VeraSeq ULtra DNA polymerase (Enzymatics), or Q5 Hot Start High-Fidelity DNA Polymerase (New England Biolabs). NBE plasmids were constructed using USER cloning (New England Biolabs). Deaminase genes were synthesized as gBlocks Gene Fragments (Integrated DNA Technologies), and Cas9 genes were obtained from previously reported plasmids.¹⁸ Deaminase and fusion genes were cloned into pCMV (mammalian codon-optimized) or pET28b (E. coli codon-optimized) backbones. sgRNA expression plasmids were constructed using site-directed mutagenesis. Briefly, the primers listed in the Supplementary Sequences were 5′ phosphorylated using T4 Polynucleotide Kinase (New England Biolabs) according to the manufacturer's instructions. Next, PCR was performed using Q5 Hot Start High-Fidelity Polymerase (New England Biolabs) with the phosphorylated primers and the plasmid pFYF1320 (EGFP sgRNA expression plasmid) as a template according to the manufacturer's instructions. PCR products were incubated with DpnI (20 U, New England Biolabs) at 37° C. for 1 h, purified on a QIAprep spin column (Qiagen), and ligated using QuickLigase (New England Biolabs) according to the manufacturer's instructions. DNA vector amplification was carried out using Mach1 competent cells (ThermoFisher Scientific).

[0328] In vitro deaminase assay on ssDNA. Sequences of all ssDNA substrates are listed in the Supplementary Sequences. All Cy3-labelled substrates were obtained from Integrated DNA Technologies (IDT). Deaminases were expressed in vitro using the TNT T7 Quick Coupled Transcription/Translation Kit (Promega) according to the manufacturer's instructions using 1 g of plasmid. Following protein expression, 5 μL of lysate was combined with 35 μL of ssDNA (1.8 μM) and USER enzyme (1 unit) in CutSmart buffer (New England Biolabs) (50 mM potassium acetate, 29 mM Trisacetate, 10 mM magnesium acetate, 100 μg/mL BSA, pH 7.9) and incubated at 37° C. for 2 h. Cleaved U-containing substrates were resolved from full-length unmodified substrates on a 10% TBE-urea gel (Bio-Rad).

[0329] Expression and purification of His6-rAPOBEC1-linker-dCas9 fusions. E. Coli BL21 STAR (DE3)-competent cells (ThermoFisher Scientific) were transformed with plasmids encoding pET28b-His₆-rAPOBEC-linker-dCas9 with GGS, (GGS)₃, (SEQ ID NO: 596) XTEN, or (GGS)₇ (SEQ ID NO: 597) linkers. The resulting expression strains were grown overnight in Luria-Bertani (LB) broth containing 100 g/mL of kanamycin at 37° C. The cells were diluted 1:100 into the same growth medium and grown at 37° C. to OD₆₀₀=−0.6. The culture was cooled to 4° C. over a period of 2 h, and isopropyl-β-D-1-thiogalactopyranoside (IPTG) was added at 0.5 mM to induce protein expression. After ˜16 h, the cells were collected by centrifugation at 4,000 g and resuspended in lysis buffer (50 mM tris(hydroxymethyl)-aminomethane (Tris)-HCl, pH 7.0, 1 M NaCl, 20% glycerol, 10 mM tris(2.-carboxyethyl)phosphine (TCEP, Soltec Ventures)). The cells were lysed by sonication (20 s pulse-on. 20 s pulse-off for 8 min total at 6 W output) and the lysate supernatant was isolated following centrifugation at 25,000 g for 15 min. The lysate was incubated with His-Pur nickel-nitriloacetic acid (nickel-NTA) resin (ThermoFisher Scientific) at 4° C. for 1 h to capture the His-tagged fusion protein. The resin was transferred to a column and washed with 40 mL of lysis buffer. The His-tagged fusion protein was eluted in lysis buffer supplemented with 285 mM imidazole, and concentrated by ultrafiltration (Amicon-Millipore, 100-kDa molecular weight cut-off) to 1 mL total volume. The protein was diluted to 20 mL in low-salt purification buffer containing 50 mM tris(hydroxymethyl)aminomethane (Tris)-HCl pH 7.0, 0.1 M NaCl, 20% glycerol, 10 mM TCEP and loaded onto SP Sepharose Fast Flow resin (GE Life Sciences), The resin was washed with 40 mL of this low-salt buffer, and the protein eluted with 5 mL of activity buffer containing 50 mM tris(hydroxymethil)-aminomethane (Tris)-HCl, pH 7.0, 0.5 M NaCl, 20% glycerol, 10 mM TCEP. The eluted proteins were quantified on a SDSPAGE gel.

[0330] In vitro transcription of sgRNAs. Linear DNA fragments containing the T7 promoter followed by the 20-bp sgRNA target. sequence were transcribed in vitro using the primers listed in the Supplementary Sequences with the TranscriptAid T7 High Yield Transcription Kit (ThermoFisher Scientific) according to the manufacturer's instructions. sgRNA products were purified using the MEGAclear Kit (ThermoFisher Scientific) according to the manufacturer's instructions and quantified by UV absorbance.

[0331] Preparation of Cy3-conjugated dsDNA substrates. Sequences of 80-nucleotide unlabeled strands are listed in the Supplementary Sequences and were ordered as PAGE-purified oligonucleotides from IDT. The 25-nt Cy3-labeled primer listed in the Supplementary Sequences is complementary to the 3′ end of each 80-nt substrate. This primer was ordered as an HPLC-purified oligonucleotide from IDT. To generate the Cy3-labeled dsDNA substrates, the 80-nt strands (5 μL of a 100 μM solution) were combined with the Cy3-labeled primer (5 μL of a 100 μM solution) in NEBuffer 2 (38.25 μL of a 50 mM NaCl, 10 mMTris-HCl, 10 mM MgCl₂, 1 mM DTT, pH 7.9 solution, New England Biolabs) with dNTPs (0.75 μL of a 100 mM solution) and heated to 95° C. for 5 min, followed by a gradual cooling to 45° C. at a rate of 0.1° C./s. After this annealing period, Klenow exo (5 U, New England Biolabs) was added and the reaction was incubated at 37° C. for 1 h. The solution was diluted with Buffer PB (250 μL, Qiagen) and isopropanol (50 μL) and purified on a QIAprep spin column (Qiagen), eluting with 50 μL of Tris buffer.

[0332] Deaminase assay on dsDNA. The purified fusion protein (20 μL of 1.9 μM in activity buffer) was combined with 1 equivalent of appropriate sgRNA and incubated at ambient temperature for 5 min. The Cy3-labeled dsDNA substrate was added to final concentration of 125 nM and the resulting solution was incubated at 37° C. for 2 h. The dsDNA was separated from the fusion by the addition of Buffer PB (100 μL, Qiagen) and isopropanol (25 μL) and purified on a EconoSpin micro spin column (Epoch Life Science), eluting with 20 μL of CutSmart buffer (New England Biolabs). USER enzyme (1 U, New England Biolabs) was added to the purified, edited dsDNA and incubated at 37° C. for 1 h. The Cy3-labeled strand was fully denatured from its complement by combining 5 μL of the reaction solution with 15 μL of a DMSO-based loading buffer (5 mM Tris, 0.5 mM EDTA, 12.5% glycerol, 0.02% bromophenol blue, 0.02% xylene cyan, 80% DMSO). The full-length C-containing substrate was separated from any cleaved, U-containing edited substrates on a 10% TBE-urea gel (Bio-Rad) and imaged on a GE Amersham Typhoon imager.

[0333] Preparation of in vitro-edited dsDNA for high-throughput sequencing (HTS). The oligonucleotides listed in the Supplementary Sequences were obtained from IDT. Complementary sequences were combined (5 μL of a 100 μM solution) in Tris buffer and annealed by heating to 95° C. for 5 min, followed by a gradual cooling to 45° C. at a rate of 0.1° C./s to generate 60-bp dsDNA substrates. Purified fusion protein (20 μL of 1.9 μM in activity buffer) was combined with 1 equivalent of appropriate sgRNA and incubated at ambient temperature for 5 min. The 60-mer dsDNA substrate was added to final concentration of 125 nM and the resulting solution was incubated at 37° C. for 2 h. The dsDNA was separated from the fusion by the addition of Buffer PB (100 μL, Qiagen) and isopropanol (25 μL) and purified on a EconoSpin micro spin column (Epoch Life Science), eluting with 20 μL of Tris buffer. The resulting edited DNA (1 μL was used as a template) was amplified by PCR using the HTS primer pairs specified in the Supplementary Sequences and VeraSeq Ultra (Enzymatics) according to the manufacturer's instructions with 13 cycles of amplification. PCR reaction products were purified using RapidTips (Diffinity Genomics), and the purified DNA was amplified by PCR with primers containing sequencing adapters, purified, and sequenced on a MiSeq high-throughput DNA sequencer (Illumina) as previously described.⁷³

[0334] Cell culture. HEK293T (ATCC CRL-3216), U2OS (ATCC-HTB-96) and ST486 cells (ATCC) were maintained in Dulbecco's Modified Eagle's Medium plus GlutaMax (ThermoFisher) supplemented with 10% (v/v) fetal bovine serum (FBS) and penicillin/streptomycin (lx, Amresco), at 37° C. with 5% CO₂. HCC1954 cells (ATCC CRL-2338) were maintained in RPMI-1640 medium (ThermoFisher Scientific) supplemented as described above. Immortalized rat astrocytes containing the ApoE4 isoform of the APOE gene (Taconic Biosciences) were cultured in Dulbecco's Modified Eagle's Medium plus GlutaMax (ThermoFisher Scientific) supplemented with 10% (v/v) fetal bovine serum (FBS) and 200 g/mL Geneticin (ThermoFisher Scientific).

[0335] Transfections. HEK293T cells were seeded on 48-well collagen-coated BioCoat plates (Corning) and transfected at approximately 85% confluency. Briefly, 750 ng of NBE and 250 ng of sgRNA expression plasmids were transfected using 1.5 μl of Lipofectamine 2000 (ThermoFisher Scientific) per well according to the manufacturer's protocol. Astrocytes, U2OS, HCC1954, HEK293T and ST486 cells were transfected using appropriate AMAXA NUCLEOFECTOR™ II programs according to manufacturer's instructions. 40 ng of infrared RFP (Addgene plasmid 45457)⁷⁴ was added to the nucleofection solution to assess nucleofection efficiencies in these cell lines. For astrocytes, U2OS, and ST486 cells, nucleofection efficiencies were 25%, 74%, and 92%, respectively. For HCC1954 cells, nucleofection efficiency was <10%. Therefore, following trypsinization, the HCC1954 cells were filtered through a 40 micron strainer (Fisher Scientific), and the nucleofected HCC1954 cells were collected on a Beckman Coulter MoFlo XDP Cell Sorter using the iRFP signal (abs 643 nm, em 670 nm). The other cells were used without enrichment of nucleofected cells.

[0336] High-throughput DNA sequencing of genomic DNA samples. Transfected cells were harvested after 3 d and the genomic DNA was isolated using the Agencourt DNAdvance Genomic DNA Isolation Kit (Beckman Coulter) according to the manufacturer's instructions. On-target and off-target genomic regions of interest were amplified by PCR with flanking HTS primer pairs listed in the Supplementary Sequences. PCR amplification was carried out with Phusion high-fidelity DNA polymerase (ThermoFisher) according to the manufacturer's instructions using 5 ng of genomic DNA as a template. Cycle numbers were determined separately for each primer pair as to ensure the reaction was stopped in the linear range of amplification (30, 28, 28, 28, 32, and 32 cycles for EMX1, FANCF, HEK293 site 2, HEK293 site 3, HEK293 site 4, and RNF2 primers, respectively). PCR products were purified using RapidTips (Diffinity Genomics). Purified DNA was amplified by PCR with primers containing sequencing adaptors. The products were gel-purified and quantified using the QUANT-IT™ PicoGreen dsDNA Assay Kit (ThermoFisher) and KAPA Library Quantification Kit-Illumina (KAPA Biosystems). Samples were sequenced on an Illumina MiSeq as previously described.⁷³

[0337] Data analysis. Sequencing reads were automatically demultiplexed using MiSeq Reporter (Illumina), and individual FASTQ files were analyzed with a custom Matlab script provided in the Supplementary Notes. Each read was pairwise aligned to the appropriate reference sequence using the Smith-Waterman algorithm. Base calls with a Q-score below 31 were replaced with N's and were thus excluded in calculating nucleotide frequencies. This treatment yields an expected MiSeq base-calling error rate of approximately 1 in 1,000. Aligned sequences in which the read and reference sequence contained no gaps were stored in an alignment table from which base frequencies could be tabulated for each locus.

[0338] Indel frequencies were quantified with a custom Matlab script shown in the Supplementary Notes using previously described criteria⁷¹. Sequencing reads were scanned for exact matches to two 10-bp sequences that flank both sides of a window in which indels might occur. If no exact matches were located, the read was excluded from analysis. If the length of this indel window exactly matched the reference sequence the read was classified as not containing an indel. If the indel window was two or more bases longer or shorter than the reference sequence, then the sequencing read was classified as an insertion or deletion, respectively.

[0339] All publications, patents, patent applications, publication, and database entries (e.g., sequence database entries) mentioned herein, e.g., in the Background, Summary, Detailed Description, Examples, and/or References sections, are hereby incorporated by reference in their entirety as if each individual publication, patent, patent application, publication, and database entry was specifically and individually incorporated herein by reference. In case of conflict, the present application, including any definitions herein, will control.

### Supplementary Sequences

[0340] Primers used for generating sgRNA transfection plasmids. rev_sgRNA_plasmid was used in all cases. The pFYF1320 plasmid was used as template as noted in Materials and Methods section. SEQ ID NOs: 329-338 appear from top to bottom below, respectively.

| | |
|---|---|
| rev_sgRNA_plasmid | GGTGTTTCGTCCTTTCCACAAG |
| fwd _p53 _Y163C | GCTTGCAGATGGCCATGGCGGTTTT |
| | AGAGCTAGAAATAGCAAGTTAAAAT |
| | AAGGC |
| fwd_p53_N239D | TGTCACACATGTAGTTGTAGGTTTT |
| | AGAGCTAGAAATAGCAAGTTAAAAT |
| | AAGGC |
| fwd_APOE4_C158R | GAAGCGCCTGGCAGTGTACCGTTTT |
| | AGAGCTAGAAATAGCAAGTTAAAAT |
| | AAGGC |
| fwd_EMX1 | GAGTCCGAGCAGAAGAAGAAGTTTT |
| | AGAGCTAGAAATAGCAAGTTAAAAT |
| | AAGGC |
| fwd_FANCF | GGAATCCCTTCTGCAGCACCGTTTT |
| | AGAGCTAGAAATAGCAAGTTAAAAT |
| | AAGGC |
| fwd_HEK293_2 | GAACACAAAGCATAGACTGCGTTTT |
| | AGAGCTAGAAATAGCAAGTTAAAAT |
| | AAGGC |
| fwd_HEK293_3 | GGCCCAGACTGAGCACGTGAGTTTT |
| | AGAGCTAGAAATAGCAAGTTAAAAT |
| | AAGGC |
| fwd_HEK293_4 | GGCACTGCGGCTGGAGGTGGGTTTT |
| | AGAGCTAGAAATAGCAAGTTAAAAT |
| | AAGGC |
| fwd_RNF2 | GTCATCTTAGTCATTACCTGGTTTT |
| | AGAGCTAGAAATAGCAAGTTAAAAT |
| | AAGGC |

[0341] Sequences of all ssDNA substrates used in in vitro deaminase assays. SEQ ID NOs: 339-341 appear from top to bottom below, respectively.

| | |
|---|---|
| rAPOBEC1 substrate | Cy3-ATTATTATTATTCCGCGGA |
| | TTTATTTATTTATTTATTTATTT |
| hAID/pmCDA1 substrate | Cy3-ATTATTATTATTAGCTATT |
| | TATTTATTTATTTATTTATTT |
| hAPOBEC3G substrate | Cy3-ATTATTATTATTCCCGGAT |
| | TTATTTATTTATTTATTTATTT |

[0342] Primers used for generating PCR products to serve as substrates for T7 transcription of sgRNAs for gel-based deaminase assay. rev_gRNA_T7 was used in all cases. The pFYF1320 plasmid was used as template as noted in Materials and Methods section. SEQ ID NOs: 342-365 appear from top to bottom below, respectively.

| | |
|---|---|
| rev_sgRNA_T7 | AAAAAAAGCACCGACTCGGTG |
| fwd_sgRNA_T7_dsDNA_2 | TAATACGACTCACTATAGGCCGCGG |
| | ATTTATTTATTTAAGTTTTAGAGCT |
| | AGAAATAGCA |
| fwd_sgRNA_T7_dsDNA_3 | TAATACGACTCACTATAGGTCCGCG |
| | GATTTATTTATTTAGTTTTAGAGCT |
| | AGAAATAGCA |
| fwd_sgRNA_T7_dsDNA_4 | TAATACGACTCACTATAGGTTCCGC |
| | GGATTTATTTATTAGTTTTAGAGCT |
| | AGAAATAGCA |
| fwd_sgRNA_T7_dsDNA_5 | TAATACGACTCACTATAGGATTCCG |
| | CGGATTTATTTATTGTTTTAGAGCT |
| | AGAAATAGCA |
| fwd_sgRNA_T7_dsDNA_6 | TAATACGACTCACTATAGGTATTCC |
| | GCGGATTTATTTATGTTTTAGAGCT |
| | AGAAATAGCA |
| fwd_sgRNA_T7_dsDNA_7 | TAATACGACTCACTATAGGTTATTC |
| | CGCGGATTTATTTAGTTTTAGAGCT |
| | AGAAATAGCA |
| fwd_sgRNA_T7_dsDNA_8 | TAATACGACTCACTATAGGATTATT |
| | CCGCGGATTTATTTGTTTTAGAGCT |
| | AGAAATAGCA |
| fwd_sgRNA_T7_dsDNA_9 | TAATACGACTCACTATAGGTATTAT |
| | TCCGCGGATTTATTGTTTTAGAGCT |
| | AGAAATAGCA |
| fwd_sgRNA_T7_dsDNA_10 | TAATACGACTCACTATAGGATTATT |
| | ATCCGCGGATTTATGTTTTAGAGCT |
| | AGAAATAGCA |
| fwd_sgRNA_T7_dsDNA_11 | TAATACGACTCACTATAGGTATTAT |
| | ATTCCGCGGATTTAGTTTTAGAGCT |
| | AGAAATAGCA |
| fwd_sgRNA_T7_dsDNA_12 | TAATACGACTCACTATAGGTTATTA |
| | TATTCCGCGGATTTGTTTTAGAGCT |
| | AGAAATAGCA |
| fwd_sgRNA_T7_dsDNA_13 | TAATACGACTCACTATAGGATTATT |
| | ATATTCCGCGGATTGTTTTAGAGCT |
| | AGAAATAGCA |
| fwd_sgRNA_T7_dsDNA_14 | TAATACGACTCACTATAGGTATTAT |
| | TATATTCCGCGGATGTTTTAGAGCT |
| | AGAAATAGCA |
| fwd_sgRNA_T7_dsDNA_15 | TAATACGACTCACTATAGGATTATT |
| | ATTATTACCGCGGAGTTTTAGAGCT |
| | AGAAATAGCA |
| fwd_sgRNA_T7_dsDNA_18 | TAATACGACTCACTATAGGATTATT |
| | ATTATTATTACCGCGTTTTAGAGCT |
| | AGAAATAGCA |
| fwd_sgRNA_T7_dsDNA | TAATACGACTCACTATAGGGGAGGA |
| APOE4_C112R | CGTGCGCGGCCGCCGTTTTAGAGCT |
| | AGAAATAGCA |
| fwd_sgRNA_T7_dsDNA | TAATACGACTCACTATAGGGAAGCG |
| APOE4_C158R | CCTGGCAGTGTACCGTTTTAGAGCT |
| | AGAAATAGCA |
| fwd_sgRNA_T7_dsDNA_ | TAATACGACTCACTATAGGCTGTGG |
| CTNNB1_T41A | CAGTGGCACCAGAAGTTTTAGAGCT |
| | AGAAATAGCA |
| fwd_sgRNA_T7_dsDNA_ | TAATACGACTCACTATAGGCCTCCC |
| HRAS_Q61R | GGCCGGCGGTATCCGTTTTAGAGCT |
| | AGAAATAGCA |
| fwd_sgRNA_T7_dsDNA_ | TAATACGACTCACTATAGGGCTTGC |
| 53_Y163C | AGATGGCCATGGCGGTTTTAGAGCT |
| | AGAAATAGCA |
| fwd_sgRNA_T7_dsDNA_ | TAATACGACTCACTATAGGACACAT |
| 53_Y236C | GCAGTTGTAGTGGAGTTTTAGAGCT |
| | AGAAATAGCA |
| fwd_sgRNA_T7_dsDNA_ | TAATACGACTCACTATAGGTGTCAC |
| 53_N23_9D | ACATGTAGTTGTAGGTTTTAGAGCT |
| | AGAAATAGCA |

[0343] Sequences of 80-nucleotide unlabeled strands and Cy3-labeled universal primer used in gel-based dsDNA deaminase assays. SEQ ID NOs: 366-390 appear from top to bottom below, respectively.

| | |
|---|---|
| Cy3-primer | Cy3-GTAGGTAGTTAGGATGAATGGAAGGTTGGTA |
| dsDNA_2 | GTCCATGGATCCAGAGGTCATCCATTAAATAAATA |
| | AATCCGCGGGGCTATACCAACCTTCCATTCATCCT |
| | AACTACCTAC |
| dsDNA_3 | GTCCATGGATCCAGAGGTCATCCATAAATAAATAA |
| | ATCCGCGGAAGCTATACCAACCTTCCATTCATCCT |
| | AACTACCTAC |
| dsDNA_4 | GTCCATGGATCCAGAGGTCATCCATAATAAATAAA |
| | TCCGCGGAAGGCTATACCAACCTTCCATTCATCCT |
| | AACTACCTAC |
| dsDNA_5 | GTCCATGGATCCAGAGGTCATCCAAATAAATAAAT |
| | CCGCGGAATGGCTATACCAACCTTCCATTCATCCT |
| | AACTACCTAC |
| dsDNA_6 | GTCCATGGATCCAGAGGTCATCCAATAAATAAATC |
| | CGCGGAATAGGCTATACCAACCTTCCATTCATCCT |
| | AACTACCTAC |
| dsDNA_7 | GTCCATGGATCCAGAGGTCATCCATAAATAAATCC |
| | GCGGAATAAGGCTATACCAACCTTCCATTCATCCT |
| | AACTACCTAC |
| dsDNA_8 | GTCCATGGATCCAGAGGTCATCCAAAATAAATCCG |
| | CGGAATAATGGCTATACCAACCTTCCATTCATCCT |
| | AACTACCTAC |
| dsDNA_9 | GTCCATGGATCCAGAGGTCATCCAAATAAATCCGC |
| | GGAATAATAGGCTATACCAACCTTCCATTCATCCT |
| | AACTACCTAC |
| dsDNA_10 | GTCCATGGATCCAGAGGTCATCCAATAAATCCGCG |
| | GATAATAATGGCTATACCAACCTTCCATTCATCCT |
| | AACTACCTAC |
| dsDNA_11 | GTCCATGGATCCAGAGGTCATCCATAAATCCGCGG |
| | AATATAATAGGCTATACCAACCTTCCATTCATCCT |
| | AACTACCTAC |
| dsDNA_12 | GTCCATGGATCCAGAGGTCATCCAAAATCCGCGGA |
| | ATATAATAAGGCTATACCAACCTTCCATTCATCCT |
| | AACTACCTAC |
| dsDNA_13 | GTCCATGGATCCAGAGGTCATCCAAATCCGCGGAA |
| | TATAATAATGGCTATACCAACCTTCCATTCATCCT |
| | AACTACCTAC |
| dsDNA_14 | GTCCATGGATCCAGAGGTCATCCAATCCGCGGAAT |
| | ATAATAATAGGCTATACCAACCTTCCATTCATCCT |
| | AACTACCTAC |
| dsDNA_15 | GTCCATGGATCCAGAGGTCATCCATCCGCGGTAAT |
| | AATAATAATGGCTATACCAACCTTCCATTCATCCT |
| | AACTACCTAC |
| dsDNA_18 | GTCCATGGATCCAGAGGTCATCCAGCGGTAATAAT |
| | AATAATAATGGCTATACCAACCTTCCATTCATCCT |
| | AACTACCTAC |
| dsDNA_noC | GTCCATGGATCCAGAGGTCATCCATTAAATAAATA |
| | AATTAATATTACTATACCAACCTTCCATTCATCCT |
| | AACTACCTAC |
| dsDNA_8U | 5Cy3- |
| | GTAGGTAGTTAGGATGAATGGAAGGTTGGTGTAGA |
| | TTATTATCUGCGGATTTATTGGATGACCTCTGGAT |
| | CCATGGACAT |
| dsDNA_APOE_ | GCACCTCGCCGCGGTACTGCACCAGGCGGCCGCGC |
| C112R | ACGTCCTCCATGTCTACCAACCTTCCATTCATCCT |
| | AACTACCTAC |
| dsDNA_APOE_ | CGGCGCCCTCGCGGGCCCCGGCCTGGTACACTGCC |
| C158R | AGGCGCTTCTGCAGTACCAACCTTCCATTCATCCT |
| | AACTACCTAC |
| dsDNA_CTNN | GTCTTACCTGGACTCTGGAATCCATTCTGGTGCCA |
| B1_T41A | CTGCCACAGCTCCTTACCAACCTTCCATTCATCCT |
| | AACTACCTAC |
| dsDNA_HRAS_ | GGAGACGTGCCTGTTGGACATCCTGGATACCGCCG |
| Q61R | GCCGGGAGGAGTACTACCAACCTTCCATTCATCCT |
| | AACTACCTAC |
| dsDNA_p53_ | ACCCCCGCCCGGCACCCGCGTCCGCGCCATGGCCA |
| Y163C | TCTGCAAGCAGTCATACCAACCTTCCATTCATCCT |
| | AACTACCTAC |
| dsDNA_p53_Y | AGGTTGGCTCTGACTGTACCACCATCCACTACAAC |
| 236C | TGCATGTGTAACAGTACCAACCTTCCATTCATCCT |
| | AACTACCTAC |
| dsDNA_p53_N | TGGCTCTGACTGTACCACCATCCACTACAACTACA |
| 239D | TGTGTGACAGTTCCTACCAACCTTCCATTCATCCT |
| | AACTACCTAC |

[0344] Primers used for generating PCR products to serve as substrates for T7 transcription of sgRNAs for high-throughput sequencing. rev_gRNA_T7 (above) was used in all cases. The pFYF1320 plasmid was used as template as noted in Materials and Methods section. SEQ ID NOs: 391-442 appear from top to bottom below, respectively.

| | |
|---|---|
| fwd_sgRNA_T7_ | TAATACGACTCACTATAGGTTATTTCGTGGA |
| HTS_ base | TTTATTTAGTTTTAGAGCTAGAAATAGCA |
| fwd_sgRNA_T7_ | TAATACGACTCACTATAGGATATTTCGTGGA |
| HTS_1A | TTTATTTAGTTTTAGAGCTAGAAATAGCA |
| fwd_sgRNA_T7_ | TAATACGACTCACTATAGGCTATTTCGTGGA |
| HTS_1C | TTTATTTAGTTTTAGAGCTAGAAATAGCA |
| fwd_sgRNA_T7_ | TAATACGACTCACTATAGGGTATTTCGTGGA |
| HTS_1G | TTTATTTAGTTTTAGAGCTAGAAATAGCA |
| fwd_sgRNA_T7_ | TAATACGACTCACTATAGGTAATTTCGTGGA |
| HTS_2A | TTTATTTAGTTTTAGAGCTAGAAATAGCA |
| fwd_sgRNA_T7_ | TAATACGACTCACTATAGGTCATTTCGTGGA |
| HTS_2C | TTTATTTAGTTTTAGAGCTAGAAATAGCA |
| fwd_sgRNA_T7_ | TAATACGACTCACTATAGGTGATTTCGTGGA |
| HTS_2G | TTTATTTAGTTTTAGAGCTAGAAATAGCA |
| fwd_sgRNA_T7_ | TAATACGACTCACTATAGGTTTTTTCGTGGA |
| HTS_3T | TTTATTTAGTTTTAGAGCTAGAAATAGCA |
| fwd_sgRNA_T7_ | TAATACGACTCACTATAGGTTCTTTCGTGGA |
| HTS_3C | TTTATTTAGTTTTAGAGCTAGAAATAGCA |
| fwd_sgRNA_T7_ | TAATACGACTCACTATAGGTTGTTTCGTGGA |
| HTS_3G | TTTATTTAGTTTTAGAGCTAGAAATAGCA |
| fwd_sgRNA_T7_ | TAATACGACTCACTATAGGTTAATTCGTGGA |
| HTS_4A | TTTATTTAGTTTTAGAGCTAGAAATAGCA |
| fwd_sgRNA_T7_ | TAATACGACTCACTATAGGTTACTTCGTGGA |
| HTS_4C | TTTATTTAGTTTTAGAGCTAGAAATAGCA |
| fwd_sgRNA_T7_ | TAATACGACTCACTATAGGTTAGTTCGTGGA |
| HTS_4G | TTTATTTAGTTTTAGAGCTAGAAATAGCA |
| fwd_sgRNA_T7_ | TAATACGACTCACTATAGGTTATATCGTGGA |
| HTS_5A | TTTATTTAGTTTTAGAGCTAGAAATAGCA |
| fwd_sgRNA_T7_ | TAATACGACTCACTATAGGTTATCTCGTGGA |
| HTS_5C | TTTATTTAGTTTTAGAGCTAGAAATAGCA |
| fwd_sgRNA_T7_ | TAATACGACTCACTATAGGTTATGTCGTGGA |
| HTS_5G | TTTATTTAGTTTTAGAGCTAGAAATAGCA |
| fwd_sgRNA_T7_ | TAATACGACTCACTATAGGTTATTACGTGGA |
| HTS_6A | TTTATTTAGTTTTAGAGCTAGAAATAGCA |
| fwd_sgRNA_T7_ | TAATACGACTCACTATAGGTTATTCCGTGGA |
| HTS_6C | TTTATTTAGTTTTAGAGCTAGAAATAGCA |
| fwd_sgRNA_T7_ | TAATACGACTCACTATAGGTTATTGCGTGGA |
| HTS_6G | TTTATTTAGTTTTAGAGCTAGAAATAGCA |
| fwd_sgRNA_T7_ | TAATACGACTCACTATAGGTTATTTCATGGA |
| HTS_8A | TTTATTTAGTTTTAGAGCTAGAAATAGCA |
| fwd_sgRNA_T7_ | TAATACGACTCACTATAGGTTATTTCTTGGA |
| HTS_8T | TTTATTTAGTTTTAGAGCTAGAAATAGCA |
| fwd_sgRNA_T7_ | TAATACGACTCACTATAGGTTATTTCCTGGA |
| HTS_8C | TTTATTTAGTTTTAGAGCTAGAAATAGCA |
| fwd_sgRNA_T7_ | TAATACGACTCACTATAGGTTATTTCGAGGA |
| HTS_9A | TTTATTTAGTTTTAGAGCTAGAAATAGCA |
| fwd_sgRNA_T7_ | TAATACGACTCACTATAGGTTATTTCGCGGA |
| HTS_9C | TTTATTTAGTTTTAGAGCTAGAAATAGCA |
| fwd_sgRNA_T7_ | TAATACGACTCACTATAGGTTATTTCGGGGA |
| HTS_9G | TTTATTTAGTTTTAGAGCTAGAAATAGCA |
| fwd_sgRNA_T7_ | TAATACGACTCACTATAGGTTATTTCGTAGA |
| HTS_10A | TTTATTTAGTTTTAGAGCTAGAAATAGCA |
| fwd_sgRNA_T7_ | TAATACGACTCACTATAGGTTATTTCGTTGA |
| HTS_10T | TTTATTTAGTTTTAGAGCTAGAAATAGCA |
| fwd_sgRNA_T7_ | TAATACGACTCACTATAGGTTATTTCGTCGA |
| HTS_10C | TTTATTTAGTTTTAGAGCTAGAAATAGCA |
| fwd_sgRNA_T7_ | TAATACGACTCACTATAGGTTATTTCGTGAA |
| HTS_11A | TTTATTTAGTTTTAGAGCTAGAAATAGCA |
| fwd_sgRNA_T7_ | TAATACGACTCACTATAGGTTATTTCGTGTA |
| HTS_11T | TTTATTTAGTTTTAGAGCTAGAAATAGCA |
| fwd_sgRNA_T7_ | TAATACGACTCACTATAGGTTATTTCGTGCA |
| HTS_11C | TTTATTTAGTTTTAGAGCTAGAAATAGCA |
| fwd_sgRNA_T7_ | TAATACGACTCACTATAGGTTATTTCGTGGT |
| HTS_12T | TTTATTTAGTTTTAGAGCTAGAAATAGCA |
| fwd_sgRNA_T7_ | TAATACGACTCACTATAGGTTATTTCGTGGC |
| HTS_12C | TTTATTTAGTTTTAGAGCTAGAAATAGCA |
| fwd_sgRNA_T7_ | TAATACGACTCACTATAGGTTATTTCGTGGG |
| HTS_12G | TTTATTTAGTTTTAGAGCTAGAAATAGCA |
| fwd_sgRNA_T7_ | TAATACGACTCACTATAGGTTATTTCGTGGA |
| HTS_13A | ATTATTTAGTTTTAGAGCTAGAAATAGCA |
| fwd_sgRNA_T7_ | TAATACGACTCACTATAGGTTATTTCGTGGA |
| HTS_13C | CTTATTTAGTTTTAGAGCTAGAAATAGCA |
| fwd_sgRNA_T7_ | TAATACGACTCACTATAGGTTATTTCGTGGA |
| HTS_13G | GTTATTTAGTTTTAGAGCTAGAAATAGCA |
| fwd_sgRNA_T7_ | TAATACGACTCACTATAGGTTCCCCCCCCGA |
| HTS_multic | TTTATTTAGTTTTAGAGCTAGAAATAGCA |
| fwd_sgRNA_T7_ | TAATACGACTCACTATAGGCGCACCCGTGGA |
| HTS_TCGCACCC_ | TTTATTTAGTTTTAGAGCTAGAAATAGCA |
| odd | |
| fwd_sgRNA_T7_ | TAATACGACTCACTATAGGCTCGCACGTGGA |
| HTS_CCTCGCAC_ | TTTATTTAGTTTTAGAGCTAGAAATAGCA |
| odd | |
| fwd_sgRNA_T7_ | TAATACGACTCACTATAGGCCCTCGCGTGGA |
| HTS_ACCCTCGC_ | TTTATTTAGTTTTAGAGCTAGAAATAGCA |
| odd | |
| fwd_sgRNA_T7_ | TAATACGACTCACTATAGGCACCCTCGTGGA |
| HTS_GCACCCTC_ | TTTATTTAGTTTTAGAGCTAGAAATAGCA |
| odd | |
| fwd_sgRNA_T7_ | TAATACGACTCACTATAGGTCGCACCCGTGG |
| HTS_TCGCACCC_ | ATTTATTAGTTTTAGAGCTAGAAATAGCA |
| even | |
| fwd_sgRNA_T7_ | TAATACGACTCACTATAGGCCTCGCACGTGG |
| HTS_CCTCGCAC_ | ATTTATTAGTTTTAGAGCTAGAAATAGCA |
| even | |
| fwd_sgRNA_T7_ | TAATACGACTCACTATAGGACCCTCGCGTGG |
| HTS_ACCCTCGC_ | ATTTATTAGTTTTAGAGCTAGAAATAGCA |
| even | |
| fwd_sgRNA_T7_ | TAATACGACTCACTATAGGGCACCCTCGTGG |
| HTS_GCACCCTC_ | ATTTATTAGTTTTAGAGCTAGAAATAGCA |
| even | |
| fwd_sgRNA_T7_ | TAATACGACTCACTATAGGGAGTCCGAGCAG |
| HTS_EMX1 | AAGAAGAAGTTTTAGAGCTAGAAATAGCA |
| fwd_sgRNA_T7_ | TAATACGACTCACTATAGGGGAATCCCTTCT |
| HTS_FANCF | GCAGCACCGTTTTAGAGCTAGAAATAGCA |
| fwd_sgRNA_T7_ | TAATACGACTCACTATAGGGAACACAAAGCA |
| HTS_HEK293_ | TAGACTGCGTTTTAGAGCTAGAAATAGCA |
| site2 | |
| fwd_sgRNA_T7_ | TAATACGACTCACTATAGGGGCCCAGACTGA |
| HTS_HEK293_ | GCACGTGAGTTTTAGAGCTAGAAATAGCA |
| site3 | |
| fwd_sgRNA_T7_ | TAATACGACTCACTATAGGGGCACTGCGGCT |
| HTS_HEK293_ | GGAGGTGGGTTTTAGAGCTAGAAATAGCA |
| site4 | |
| fwd_sgRNA_T7_ | TAATACGACTCACTATAGGGTCATCTTAGTC |
| HTS_RNF2 | ATTACCTGGTTTTAGAGCTAGAAATAGCA |

[0345] Sequences of in vitro-edited dsDNA for high-throughput sequencing (HTS). Shown are the sequences of edited strands. Reverse complements of all sequences shown were also obtained. dsDNA substrates were obtained by annealing complementary strands as described in Materials and Methods. Oligonucleotides representing the EMX1, FANCF, HEK293 site 2, HEK293 site 3, HEK293 site 4, and RNF2 loci were originally designed for use in the gel-based deaminase assay and therefore have the same 25-nt sequence on their 5′-ends (matching that of the Cy3-primer). SEQ ID NOs: 443-494 appear from top to bottom below, respectively.

| | |
|---|---|
| Base | ACGTAAACGGCCACAAGTTCTTATTTCGTGGATT |
| sequence | TATTTATGGCATCTTCTTCAAGGACG |
| 1A | ACGTAAACGGCCACAAGTTCATATTTCGTGGATT |
| | TATTTATGGCATCTTCTTCAAGGACG |
| 1C | ACGTAAACGGCCACAAGTTCCTATTTCGTGGATT |
| | TATTTATGGCATCTTCTTCAAGGACG |
| 1G | ACGTAAACGGCCACAAGTTCGTATTTCGTGGATT |
| | TATTTATGGCATCTTCTTCAAGGACG |
| 2A | ACGTAAACGGCCACAAGTTCTAATTTCGTGGATT |
| | TATTTATGGCATCTTCTTCAAGGACG |
| 2C | ACGTAAACGGCCACAAGTTCTCATTTCGTGGATT |
| | TATTTATGGCATCTTCTTCAAGGACG |
| 2G | ACGTAAACGGCCACAAGTTCTGATTTCGTGGATT |
| | TATTTATGGCATCTTCTTCAAGGACG |
| 3T | ACGTAAACGGCCACAAGTTCTTTTTTCGTGGATT |
| | TATTTATGGCATCTTCTTCAAGGACG |
| 3C | ACGTAAACGGCCACAAGTTCTTCTTTCGTGGATT |
| | TATTTATGGCATCTTCTTCAAGGACG |
| 3G | ACGTAAACGGCCACAAGTTCTTGTTTCGTGGATT |
| | TATTTATGGCATCTTCTTCAAGGACG |
| 4A | ACGTAAACGGCCACAAGTTCTTAATTCGTGGATT |
| | TATTTATGGCATCTTCTTCAAGGACG |
| 4C | ACGTAAACGGCCACAAGTTCTTACTTCGTGGATT |
| | TATTTATGGCATCTTCTTCAAGGACG |
| 4G | ACGTAAACGGCCACAAGTTCTTAGTTCGTGGATT |
| | TATTTATGGCATCTTCTTCAAGGACG |
| 5A | ACGTAAACGGCCACAAGTTCTTATATCGTGGATT |
| | TATTTATGGCATCTTCTTCAAGGACG |
| 5C | ACGTAAACGGCCACAAGTTCTTATCTCGTGGATT |
| | TATTTATGGCATCTTCTTCAAGGACG |
| 5G | ACGTAAACGGCCACAAGTTCTTATGTCGTGGATT |
| | TATTTATGGCATCTTCTTCAAGGACG |
| 6A | ACGTAAACGGCCACAAGTTCTTATTACGTGGATT |
| | TATTTATGGCATCTTCTTCAAGGACG |
| 6C | ACGTAAACGGCCACAAGTTCTTATTCCGTGGATT |
| | TATTTATGGCATCTTCTTCAAGGACG |
| 6G | ACGTAAACGGCCACAAGTTCTTATTGCGTGGATT |
| | TATTTATGGCATCTTCTTCAAGGACG |
| 8A | ACGTAAACGGCCACAAGTTCTTATTTCATGGATT |
| | TATTTATGGCATCTTCTTCAAGGACG |
| 8T | ACGTAAACGGCCACAAGTTCTTATTTCTTGGATT |
| | TATTTATGGCATCTTCTTCAAGGACG |
| 8C | ACGTAAACGGCCACAAGTTCTTATTTCCTGGATT |
| | TATTTATGGCATCTTCTTCAAGGACG |
| 9A | ACGTAAACGGCCACAAGTTCTTATTTCGAGGATT |
| | TATTTATGGCATCTTCTTCAAGGACG |
| 9C | ACGTAAACGGCCACAAGTTCTTATTTCGCGGATT |
| | TATTTATGGCATCTTCTTCAAGGACG |
| 9G | ACGTAAACGGCCACAAGTTCTTATTTCGGGGATT |
| | TATTTATGGCATCTTCTTCAAGGACG |
| 10A | ACGTAAACGGCCACAAGTTCTTATTTCGTAGATT |
| | TATTTATGGCATCTTCTTCAAGGACG |
| 10T | ACGTAAACGGCCACAAGTTCTTATTTCGTTGATT |
| | TATTTATGGCATCTTCTTCAAGGACG |
| 10C | ACGTAAACGGCCACAAGTTCTTATTTCGTCGATT |
| | TATTTATGGCATCTTCTTCAAGGACG |
| 11A | ACGTAAACGGCCACAAGTTCTTATTTCGTGAATT |
| | TATTTATGGCATCTTCTTCAAGGACG |
| 11T | ACGTAAACGGCCACAAGTTCTTATTTCGTGTATT |
| | TATTTATGGCATCTTCTTCAAGGACG |
| 11C | ACGTAAACGGCCACAAGTTCTTATTTCGTGCATT |
| | TATTTATGGCATCTTCTTCAAGGACG |
| 12T | ACGTAAACGGCCACAAGTTCTTATTTCGTGGTTT |
| | TATTTATGGCATCTTCTTCAAGGACG |
| 12C | ACGTAAACGGCCACAAGTTCTTATTTCGTGGCTT |
| | TATTTATGGCATCTTCTTCAAGGACG |
| 12G | ACGTAAACGGCCACAAGTTCTTATTTCGTGGGTT |
| | TATTTATGGCATCTTCTTCAAGGACG |
| 13A | ACGTAAACGGCCACAAGTTCTTATTTCGTGGAAT |
| | TATTTATGGCATCTTCTTCAAGGACG |
| 13C | ACGTAAACGGCCACAAGTTCTTATTTCGTGGACT |
| | TATTTATGGCATCTTCTTCAAGGACG |
| 13G | ACGTAAACGGCCACAAGTTCTTATTTCGTGGAGT |
| | TATTTATGGCATCTTCTTCAAGGACG |
| multic | ACGTAAACGGCCACAAGTTCTTCCCCCCCCGATT |
| | TATTTATGGCATCTTCTTCAAGGACG |
| TCGCACCC_ | ACGTAAACGGCCACAAGTTTCGCACCCGTGGATT |
| odd | TATTTATGGCATCTTCTTCAAGGACG |
| CCTCGCAC_ | ACGTAAACGGCCACAAGTTCCTCGCACGTGGATT |
| odd | TATTTATGGCATCTTCTTCAAGGACG |
| ACCCTCGC_ | ACGTAAACGGCCACAAGTTACCCTCGCGTGGATT |
| odd | TATTTATGGCATCTTCTTCAAGGACG |
| GCACCCTC_ | ACGTAAACGGCCACAAGTTGCACCCTCGTGGATT |
| odd | TATTTATGGCATCTTCTTCAAGGACG |
| TCGCACCC_ | ACGTAAACGGCCACAAGTATTCGCACCCGTGGAT |
| even | TTATTATGGCATCTTCTTCAAGGACG |
| CCTCGCAC_ | ACGTAAACGGCCACAAGTATCCTCGCACGTGGAT |
| even | TTATTATGGCATCTTCTTCAAGGACG |
| ACCCTCGC_ | ACGTAAACGGCCACAAGTATACCCTCGCGTGGAT |
| even | TTATTATGGCATCTTCTTCAAGGACG |
| GCACCCTC_ | ACGTAAACGGCCACAAGTATGCACCCTCGTGGAT |
| even | TTATTATGGCATCTTCTTCAAGGACG |
| EMX1_ | GTAGGTAGTTAGGATGAATGGAAGGTTGGTAGGC |
| invitro | CTGAGTCCGAGCAGAAGAAGAAGGGCTCCCATCA |
| | CATCAACCGGTG |
| FANCF_ | GTAGGTAGTTAGGATGAATGGAAGGTTGGTACTC |
| invitro | ATGGAATCCCTTCTGCAGCACCTGGATCGCTTTT |
| | CCGAGCTTCTGG |
| HEK293_ | GTAGGTAGTTAGGATGAATGGAAGGTTGGTAAAC |
| site2 | TGGAACACAAAGCATAGACTGCGGGGGGGGCCAG |
| invitro | CCTGAATAGCTG |
| HEK293_ | GTAGGTAGTTAGGATGAATGGAAGGTTGGTACTT |
| site3 | GGGGCCCAGACTGAGCACGTGATGGCAGAGGAAA |
| invitro | GGAAGCCCTGCT |
| HEK293_ | GTAGGTAGTTAGGATGAATGGAAGGTTGGTACCG |
| site4 | GTGGCACTGCGGCTGGAGGTGGGGGTTAAAGCG |
| invitro | GAGACTCTGGTGC |
| RNF2_ | GTAGGTAGTTAGGATGAATGGAAGGTTGGTATGG |
| invitro | CAGTCATCTTAGTCATTACCTGAGGTGTTCGTTG |
| | TAACTCATATAA |

[0346] Primers for HTS of in vitro edited dsDNA. SEQ ID NOs: 495-503 appear from top to bottom below, respectively.

| | |
|---|---|
| fwd_ | ACACTCTTTCCCTACACGACGCTCTTCCGAT |
| invitro_ | CTNNNNACGTAAACGGCCACAA |
| HTS | |
| rev_ | TGGAGTTCAGACGTGTGCTCTTCCGATCTCG |
| invitro_ | TCCTTGAAGAAGATGC |
| HTS | |
| fwd_ | ACACTCTTTCCCTACACGACGCTCTTCCGAT |
| invitro_ | CTNNNNGTAGGTAGTTAGGATGAATGGAA |
| HEK_ | |
| targets | |
| rev_EMX1_ | TGGAGTTCAGACGTGTGCTCTTCCGATCTCA |
| invitro | CCGGTTGATGTGATGG |
| rev_ | TGGAGTTCAGACGTGTGCTCTTCCGATCTCC |
| FANCF_ | AGAAGCTCGGAAAAGC |
| invitro | |
| rev_ | TGGAGTTCAGACGTGTGCTCTTCCGATCTCA |
| HEK293_ | GCTATTCAGGCTGGC |
| site2_ | |
| invitro | |
| rev_ | TGGAGTTCAGACGTGTGCTCTTCCGATCTAG |
| HEK293_ | CAGGGCTTCCTTTC |
| site3_ | |
| invitro | |
| rev_ | TGGAGTTCAGACGTGTGCTCTTCCGATCTGC |
| HEK293_ | ACCAGAGTCTCCG |
| site4_ | |
| invitro | |
| rev_RNF2_ | TGGAGTTCAGACGTGTGCTCTTCCGATCTTT |
| invitro | ATATGAGTTACAACGAACACC |

[0347] Primers for HTS of on-target and off-target sites from all mammalian cell culture experiments. SEQ ID NOs: 504-579 and 1869-1900 appear from top to bottom below, respectively.

| | |
|---|---|
| fwd_EMX1_HTS | ACACTCTTTCCCTACACGACGCTCTTCCGATCTNNNNCAGCTCAGCCTGAGTGTTGA |
| rev_EMX1_HTS | TGGAGTTCAGACGTGTGCTCTTCCGATCTCTCGTGGGTTTGTGGTTGC |
| fwd_FANCF_HTS | ACACTCTTTCCCTACACGACGCTCTTCCGATCTNNNNCATTGCAGAGAGGCGTATCA |
| rev_FANCF_HTS | TGGAGTTCAGACGTGTGCTCTTCCGATCTGGGGTCCCAGGTGCTGAC |
| fwd_HEK293_site2_HTS | ACACTCTTTCCCTACACGACGCTCTTCCGATCTNNNNCCAGCCCCATCTGTCAAACT |
| rev_HEK293_site2_HTS | TGGAGTTCAGACGTGTGCTCTTCCGATCTTGAATGGATTCCTTGGAAACAATGA |
| fwd_HEK293_site3_HTS | ACACTCTTTCCCTACACGACGCTCTTCCGATCTNNNNATGTGGGCTGCCTAGAAAGG |
| rev_HEK293_site3_HTS | TGGAGTTCAGACGTGTGCTCTTCCGATCTCCCAGCCAAACTTGTCAACC |
| fwd_HEK293_site4_HTS | ACACTCTTTCCCTACACGACGCTCTTCCGATCTNNNNGAACCCAGGTAGCCAGAGAC |
| rev_HEK293_site4_HTS | TGGAGTTCAGACGTGTGCTCTTCCGATCTTCCTTTCAACCCGAACGGAG |
| fwd_RNF2_HTS | ACACTCTTTCCCTACACGACGCTCTTCCGATCTNNNNCTCTTCTTTATTTCCAGCAATGT |
| rev_RNF2_HTS | TGGAGTTCAGACGTGTGCTCTTCCGATCTGTTTTCATGTTCTAAAAATGTATCCCA |
| fwd_p53_Y163C_HTS | ACACTCTTTCCCTACACGACGCTCTTCCGATCTNNNNTACAGTACTCCCCTGCCCTC |
| rev_p53_Y163C_HTS | TGGAGTTCAGACGTGTGCTCTTCCGATCTGCTGCTCACCATCGCTATCT |
| fwd_p53_N239D_HTS | ACACTCTTTCCCTACACGACGCTCTTCCGATCTNNNNCCTCATCTTGGGCCTGTGTT |
| rev_p53_N239D_HTS | TGGAGTTCAGACGTGTGCTCTTCCGATCTAAATCGGTAAGAGGTGGGCC |
| fwd_APOE4_C158R_HTS | ACACTCTTTCCCTACACGACGCTCTTCCGATCTNNNNGCGGACATGGAGGACGTG |
| rev_APOE4_C158R_HTS | TGGAGTTCAGACGTGTGCTCTTCCGATCTCTGTTCCACCAGGGGCCC |
| fwd_EMX1_off1_HTS | ACACTCTTTCCCTACACGACGCTCTTCCGATCTNNNNTGCCCAATCATTGATGCTTTT |
| rev_EMX1_off1_HTS | TGGAGTTCAGACGTGTGCTCTTCCGATCTAGAAACATTTACCATAGACTATCACCT |
| fwd_EMX1_off2_HTS | ACACTCTTTCCCTACACGACGCTCTTCCGATCTNNNNAGTAGCCTCTTTCTCAATGTGC |
| rev_EMX1_off2_HTS | TGGAGTTCAGACGTGTGCTCTTCCGATCTGCTTTCACAAGGATGCAGTCT |
| fwd_EMX1_off3_HTS | ACACTCTTTCCCTACACGACGCTCTTCCGATCTNNNNGAGCTAGACTCCGAGGGGA |
| rev_EMX1_off3_HTS | TGGAGTTCAGACGTGTGCTCTTCCGATCTTCCTCGTCCTGCTCTCACTT |
| fwd_EMX1_off4_HTS | ACACTCTTTCCCTACACGACGCTCTTCCGATCTNNNNAGAGGCTGAAGAGGAAGACCA |
| rev_EMX1_off4_HTS | TGGAGTTCAGACGTGTGCTCTTCCGATCTGGCCCAGCTGTGCATTCTAT |
| fwd_EMX1_off6_HTS | ACACTCTTTCCCTACACGACGCTCTTCCGATCTNNNNCCAAGAGGGCCAAGTCCTG |
| rev_EMX1_off6_HTS | TGGAGTTCAGACGTGTGCTCTTCCGATCTCAGCGAGGAGTGACAGCC |
| fwd_EMX1_off7_HTS | ACACTCTTTCCCTACACGACGCTCTTCCGATCTNNNNCACTCCACCTGATCTCGGGG |
| rev_EMX1_off7_HTS | TGGAGTTCAGACGTGTGCTCTTCCGATCTCGAGGAGGGAGGGAGCAG |
| fwd_EMX1_off8_HTS | ACACTCTTTCCCTACACGACGCTCTTCCGATCTNNNNACCACAAATGCCCAAGAGAC |
| rev_EMX1_off8_HTS | TGGAGTTCAGACGTGTGCTCTTCCGATCTGACACAGTCAAGGGCCGG |
| fwd_EMX1_off9_HTS | ACACTCTTTCCCTACACGACGCTCTTCCGATCTNNNNCCCACCTTTGAGGAGGCAAA |
| rev_EMX1_off9_HTS | TGGAGTTCAGACGTGTGCTCTTCCGATCTTTCCATCTGAGAAGAGAGTGGT |
| fwd_EMX1_off10_HTS | ACACTCTTTCCCTACACGACGCTCTTCCGATCTNNNNGTCATACCTTGGCCCTTCCT |
| rev_EMX1_off10_HTS | TGGAGTTCAGACGTGTGCTCTTCCGATCTTCCCTAGGCCCACACCAG |
| fwd_FANCF_off1_HTS | ACACTCTTTCCCTACACGACGCTCTTCCGATCTNNNNAACCCACTGAAGAAGCAGGG |
| rev_FANCF_off1_HTS | TGGAGTTCAGACGTGTGCTCTTCCGATCTGGTGCTTAATCCGGCTCCAT |
| fwd_FANCF_off2_HTS | ACACTCTTTCCCTACACGACGCTCTTCCGATCTNNNNTCCAGTGTTTCCATCCCGAA |
| rev_FANCF_off2_HTS | TGGAGTTCAGACGTGTGCTCTTCCGATCTCCTCTGACCTCCACAACTCT |
| fwd_FANCF_off3_HTS | ACACTCTTTCCCTACACGACGCTCTTCCGATCTNNNNCTGGGTACAGTTCTGCGTGT |
| rev_FANCF_off3_HTS | TGGAGTTCAGACGTGTGCTCTTCCGATCTTCACTCTGAGCATCGCCAAG |
| fwd_FANCF_off4_HTS | ACACTCTTTCCCTACACGACGCTCTTCCGATCTNNNNGGTTTAGAGCCAGTGAACTAGAG |
| rev_FANCF_off4_HTS | TGGAGTTCAGACGTGTGCTCTTCCGATCTGCAAGACAAAATCCTCTTTATACTTTG |
| fwd_FANCF_off5_HTS | ACACTCTTTCCCTACACGACGCTCTTCCGATCTNNNNGGGAGGGGACGGCCTTAC |
| rev_FANCF_off5_HTS | TGGAGTTCAGACGTGTGCTCTTCCGATCTGCCTCTGGCGAACATGGC |
| fwd_FANCF_off6_HTS | ACACTCTTTCCCTACACGACGCTCTTCCGATCTNNNNTCCTGGTTAAGAGCATGGGC |
| rev_FANCF_off6_HTS | TGGAGTTCAGACGTGTGCTCTTCCGATCTGATTGAGTCCCCACAGCACA |
| fwd_FANCF_off_HTS | ACACTCTTTCCCTACACGACGCTCTTCCGATCTNNNNCCAGTGTTTCCCATCCCCAA |
| rev_FANCF_off_HTS | TGGAGTTCAGACGTGTGCTCTTCCGATCTTGACCTCCACAACTGGAAAAT |
| fwd_FANCF_off8_HTS | ACACTCTTTCCCTACACGACGCTCTTCCGATCTNNNNGCTTCCAGACCCACCTGAAG |
| rev_FANCF_off8_HTS | TGGAGTTCAGACGTGTGCTCTTCCGATCTACCGAGGAAAATTGCTTGTCG |
| fwd_HEK293_site2_off1_HTS | ACACTCTTTCCCTACACGACGCTCTTCCGATCTNNNNGTGTGGAGAGTGAGTAAGCCA |
| rev_HEK293_site2_off1_HTS | TGGAGTTCAGACGTGTGCTCTTCCGATCTACGGTAGGATGATTTCAGGCA |
| fwd_HEK293_site2_off2_HTS | ACACTCTTTCCCTACACGACGCTCTTCCGATCTNNNNCACAAAGCAGTGTAGCTCAGG |
| rev_HEK293_site2_off2_HTS | TGGAGTTCAGACGTGTGCTCTTCCGATCTTTTTTGGTACTCGAGTGTTATTCAG |
| fwd_HEK293_site3_off1_HTS | ACACTCTTTCCCTACACGACGCTCTTCCGATCTNNNNTCCCCTGTTGACCTGGAGAA |
| rev_HEK293_site3_off1_HTS | TGGAGTTCAGACGTGTGCTCTTCCGATCTCACTGTACTTGCCCTGACCA |
| fwd_HEK293_site3_off2_HTS | ACACTCTTTCCCTACACGACGCTCTTCCGATCTNNNNTTGGTGTTGACAGGGAGCAA |
| rev_HEK293_site3_off2_HTS | TGGAGTTCAGACGTGTGCTCTTCCGATCTCTGAGATGTGGGCAGAAGGG |
| fwd_HEK293_site3_off3_HTS | ACACTCTTTCCCTACACGACGCTCTTCCGATCTNNNNTGAGAGGGAACAGAAGGGCT |
| rev_HEK293_site3_off3_HTS | TGGAGTTCAGACGTGTGCTCTTCCGATCTGTCCAAAGGCCCAAGAACCT |
| fwd_HEK293_site3_off4_HTS | ACACTCTTTCCCTACACGACGCTCTTCCGATCTNNNNTCCTAGCACTTTGGAAGGTCG |
| rev_HEK293_site3_off4_HTS | TGGAGTTCAGACGTGTGCTCTTCCGATCTGCTCATCTTAATCTGCTCAGCC |
| fwd_HEK293_site3_off5_HTS | ACACTCTTTCCCTACACGACGCTCTTCCGATCTNNNNAAAGGAGCAGCTCTTCCTGG |
| rev_HEK293_site3_off5_HTS | TGGAGTTCAGACGTGTGCTCTTCCGATCTGTCTGCACCATCTCCCACAA |
| fwd_HEK293_site4_off1_HTS | ACACTCTTTCCCTACACGACGCTCTTCCGATCTNNNNGGCATGGCTTCTGAGACTCA |
| rev_HEK293_site4_off1_HTS | TGGAGTTCAGACGTGTGCTCTTCCGATCTGTCTCCCTTGCACTCCCTGTCTTT |
| fwd_HEK293_site4_off2_HTS | ACACTCTTTCCCTACACGACGCTCTTCCGATCTNNNNTTTGGCAATGGAGGCATTGG |
| rev_HEK293_site4_off2_HTS | TGGAGTTCAGACGTGTGCTCTTCCGATCTGAAGAGGCTGCCCATGAGAG |
| fwd_HEK293_site4_off3_HTS | ACACTCTTTCCCTACACGACGCTCTTCCGATCTNNNNGGTCTGAGGCTCGAATCCTG |
| rev_HEK293_site4_off3_HTS | TGGAGTTCAGACGTGTGCTCTTCCGATCTCTGTGGCCTCCATATCCCTG |
| fwd_HEK293_site4_off4_HTS | ACACTCTTTCCCTACACGACGCTCTTCCGATCTNNNNTTTCCACCAGAACTCAGCCC |
| rev_HEK293_site4_off4_HTS | TGGAGTTCAGACGTGTGCTCTTCCGATCTCCTCGGTTCCTCCACAACAC |
| fwd_HEK293_site4_off5_HTS | ACACTCTTTCCCTACACGACGCTCTTCCGATCTNNNNCACGGGAAGGACAGGAGAA¢ |
| rev_HEK293_site4_off5_HTS | TGGAGTTCAGACGTGTGCTCTTCCGATCTGCAGGGGAGGGATAAAGCAG |
| fwd_HEK293_site4_off6_HTS | ACACTCTTTCCCTACACGACGCTCTTCCGATCTNNNNCCACGGGAGATGGCTTATGT |
| rev_HEK293_site4_off6_HTS | TGGAGTTCAGACGTGTGCTCTTCCGATCTCACATCCTCACTGTGCCACT |
| fwd_HEK293_site4_off_HTS | ACACTCTTTCCCTACACGACGCTCTTCCGATCTNNNNGTCAGTCTCGGCCCCTCA |
| rev_HEK293_site4_off_HTS | TGGAGTTCAGACGTGTGCTCTTCCGATCTGCCACTGTAAAGCTCTTGGG |
| fwd_HEK293_site4_off8_HTS | ACACTCTTTCCCTACACGACGCTCTTCCGATCTNNNNAGGGTAGAGGGACAGAGCTG |
| rev_HEK293_site4_off8_HTS | TGGAGTTCAGACGTGTGCTCTTCCGATCTGGACCCCACATAGTCAGTGC |
| fwd_HEK293_site4_off9_HTS | ACACTCTTTCCCTACACGACGCTCTTCCGATCTNNNNGCTGTCAGCCCTATCTCCATC |
| rev_HEK293_site4_off9_HTS | TGGAGTTCAGACGTGTGCTCTTCCGATCTTGGGCAATTAGGACAGGGAC |
| fwd_HEK293_site4_off10_HTS | ACACTCTTTCCCTACACGACGCTCTTCCGATCTNNNNGCAGCGGAGGAGGTAGATTG |
| rev_HEK293_site4_off10_HTS | TGGAGTTCAGACGTGTGCTCTTCCGATCTCTCAGTACCTGGAGTCCCGA |
| fwd_HEK2_ChIP_off1_HTS | ACACTCTTTCCCTACACGACGCTCTTCCGATCTNNNNGACAGGCTCAGGAAAGCTGT |
| rev_HEK2_ChIP_off1_HTS | TGGAGTTCAGACGTGTGCTCTTCCGATCTACACAAGCCTTTCTCCAGGG |
| fwd_HEK2_ChIP_off2_HTS | ACACTCTTTCCCTACACGACGCTCTTCCGATCTNNNNAATAGGGGGTGAGACTGGGG |
| rev_HEK2_ChIP_off2_HTS | TGGAGTTCAGACGTGTGCTCTTCCGATCTGCCTCAGACGAGACTTGAGG |
| fwd_HEK2_ChIP_off3_HTS | ACACTCTTTCCCTACACGACGCTCTTCCGATCTNNNNGGCCAGCAGGAAAGGAATCT |
| rev HEK2 ChIP off3 HTS | TGGAGTTCAGACGTGTGCTCTTCCGATCTTGACTGCACCTGTAGCCATG |
| fwd_HEK2_ChIP_off4_HTS | ACACTCTTTCCCTACACGACGCTCTTCCGATCTNNNNTCAAGGAAATCACCCTGCCC |
| rev_HEK2_ChIP_off4_HTS | TGGAGTTCAGACGTGTGCTCTTCCGATCTAACTTCCTTGGTGTGCAGCT |
| fwd_HEK2_ChIP_off5_HTS | ACACTCTTTCCCTACACGACGCTCTTCCGATCTNNNNATGGGCTCAGCTACGTCATG |
| rev HEK2 ChIP off5 HTS | TGGAGTTCAGACGTGTGCTCTTCCGATCTAATAGCAGTGTGGTGGGCAA |
| fwd_HEK3_ChIP_off1_HTS | ACACTCTTTCCCTACACGACGCTCTTCCGATCTNNNNCGCACATCCCTTGTCTCTCT |
| rev_HEK3_ChIP_off1_HTS | TGGAGTTCAGACGTGTGCTCTTCCGATCTCTACTGGAGCACACCCCAAG |
| fwd_HEK3_ChIP_off2_HTS | ACACTCTTTCCCTACACGACGCTCTTCCGATCTNNNNTGGGTCACGTAGCTTTGGTC |
| rev_HEK3_ChIP_off2_HTS | TGGAGTTCAGACGTGTGCTCTTCCGATCTTGGTGGCCATGTGCAACTAA |
| fwd_HEK3_ChIP_off3_HTS | ACACTCTTTCCCTACACGACGCTCTTCCGATCTNNNNCTACTACGTGCCAGCTCAGG |
| rev_HEK3_ChIP_off3_HTS | TGGAGTTCAGACGTGTGCTCTTCCGATCTACCTCCCCTCCTCACTAACC |
| fwd_HEK3_ChIP_off4_HTS | ACACTCTTTCCCTACACGACGCTCTTCCGATCTNNNNGCCTCAGCTCCATTTCCTGT |
| rev_HEK3_ChIP_off4_HTS | TGGAGTTCAGACGTGTGCTCTTCCGATCTAACCTTTATGGCACCAGGGG |
| fwd_HEK3_ChIP_off5_HTS | ACACTCTTTCCCTACACGACGCTCTTCCGATCTNNNNGAGCTCAGCATTAGCAGGCT |
| rev_HEK3_ChIP_off5_HTS | TGGAGTTCAGACGTGTGCTCTTCCGATCTTTCCTGGCTTTCCGATTCCC |
| fwd_HEK4_ChIP_off1_HTS | ACACTCTTTCCCTACACGACGCTCTTCCGATCTNNNNGTGCAATTGGAGGAGGAGCT |
| rev_HEK4_ChIP_off1_HTS | TGGAGTTCAGACGTGTGCTCTTCCGATCTCACCAGCTACAGGCAGAACA |
| fwd_HEK4_ChIP_off3_HTS | ACACTCTTTCCCTACACGACGCTCTTCCGATCTNNNNCCTACCCCCAACACAGATGG |
| rev_HEK4_ChIP_off3_HTS | TGGAGTTCAGACGTGTGCTCTTCCGATCTCCACACAACTCAGGTCCTCC |

[0348] Sequences of single-stranded oligonucleotide donor templates (ssODNs) used in HDR studies.

EMX1 sense
(SEQ ID NO: 580)
TCATCTGTGCCCCTCCCTCCCTGGCCCAGGTGAAGGTGTGGTTCCAG
AACCGGAGGACAAAGTACAAACGGCAGAAGCTGGAGGAGGAAGGGCC
TGAGTTTGAGCAGAAGAAGAAGGGCTCCCATCACATCAACCGGTGGC
GCATTGCCACGAAGCAGGCCAATGGGGAGGACATCGATGTCACCTCC
AATGACTAGGGT
EMX1 antisense
(SEQ ID NO: 581)
ACCCTAGTCATTGGAGGTGACATCGATGTCCTCCCCATTGGCCTGCT
TCGTGGCAATGCGCCACCGGTTGATGTGATGGGAGCCCTTCTTCTTC
TGCTCAAACTCAGGCCCTTCCTCCTCCAGCTTCTGCCGTTTGTACTT
TGTCCTCCGGTTCTGGAACCACACCTTCACCTGGGCCAGGGAGGGAG
GGGCACAGATGA
HEK293 site 3 sense
(SEQ ID NO: 582)
CATGCAATTAGTCTATTTCTGCTGCAAGTAAGCATGCATTTGTAGGC
TTGATGCTTTTTTTCTGCTTCTCCAGCCCTGGCCTGGGTCAATCCTT
GGGGCTTAGACTGAGCACGTGATGGCAGAGGAAAGGAAGCCCTGCTT
CCTCCAGAGGGCGTCGCAGGACAGCTTTTCCTAGACAGGGGCTAGTA
TGTGCAGCTCCT
HEK293 site 3 antisense
(SEQ ID NO: 583)
AGGAGCTGCACATACTAGCCCCTGTCTAGGAAAAGCTGTCCTGCGAC
GCCCTCTGGAGGAAGCAGGGCTTCCTTTCCTCTGCCATCACGTGCTC
AGTCTAAGCCCCAAGGATTGACCCAGGCCAGGGCTGGAGAAGCAGAA
AAAAAGCATCAAGCCTACAAATGCATGCTTACTTGCAGCAGAAATAG
ACTAATTGCATG
HEK site 4 sense
(SEQ ID NO: 584)
GGCTGACAAAGGCCGGGCTGGGTGGAAGGAAGGGAGGAAGGGCGAGG
CAGAGGGTCCAAAGCAGGATGACAGGCAGGGGCACCGCGGCGCCCCG
GTGGCATTGCGGCTGGAGGTGGGGGTTAAAGCGGAGACTCTGGTGCT
GTGTGACTACAGTGGGGGCCCTGCCCTCTCTGAGCCCCCGCCTCCAG
GCCTGTGTGTGT
HEK site 4 antisense
(SEQ ID NO: 585)
ACACACACAGGCCTGGAGGGGGGGGCTCAGAGAGGGCAGGGCCCCCA
CTGTAGTCACACAGCACCAGAGTCTCCGCTTTAACCCCCACCTCCAG
CCGCAATGCCACCGGGGCGCCGCGGTGCCCCTGCCTGTCATCCTGCT
TTGGACCCTCTGCCTCGCCCTTCCTCCCTTCCTTCCACCCAGCCCGG
CCTTTGTCAGCC
APOE4 sense
(SEQ ID NO: 743)
AGCACCGAGGAGCTGCGGGTGCGCCTCGCCTCCCACCTGCGCAAGCT
GCGTAAGCGGCTCCTCCGCGATGCCGATGACCTGCAGAAGTGCCTGG
CAGTGTACCAGGCCGGGGCCCGCGAGGGCGCCGAGCGCGGCCTCAGC
GCCATCCGCGAGCGCCTGGGGCCCCTGGTGGAACAGGGCCGCGTGCG
GGCCGCCACTGT
APOE4 antisense
(SEQ ID NO: 744)
ACAGTGGCGGCCCGCACGCGGCCCTGTTCCACCAGGGGCCCCAGGCG
CTCGCGGATGGCGCTGAGGCCGCGCTCGGCGCCCTCGCGGGCCCCGG
CCTGGTACACTGCCAGGCACTTCTGCAGGTCATCGGCATCGCGGAGG
AGCCGCTTACGCAGCTTGCGCAGGTGGGAGGCGAGGCGCACCCGCAG
CTCCTCGGTGCT
p53 Y163C sense
(SEQ ID NO: 745)
ACTCCCCTGCCCTCAACAAGATGTTTTGCCAACTGGCCAAGACCTGC
CCTGTGCAGCTGTGGGTTGATTCCACACCCCCGCCCGGCACCCGCGT
CCGCGCCATGGCCATCTACAAGCAGTCACAGCACATGACGGAGGTTG
TGAGGCGCTGCCCCCACCATGAGCGCTGCTCAGATAGCGATGGTGAG
CAGCTGGGGCTG
p53 Y163C antisense
(SEQ ID NO: 746)
CAGCCCCAGCTGCTCACCATCGCTATCTGAGCAGCGCTCATGGTGGG
GGCAGCGCCTCACAACCTCCGTCATGTGCTGTGACTGCTTGTAGATG
GCCATGGCGCGGACGCGGGTGCCGGGGGGGGGTGTGGAATCAACCCA
CAGCTGCACAGGGCAGGTCTTGGCCAGTTGGCAAAACATCTTGTTGA
GGGCAGGGGAGT

Deaminase Gene gBlocks Gene Fragments

hAID
(SEQ ID NO: 586)
CATCCTTGGTACCGAGCTCGGATCCAGCCACCATGGATAGCCTCTTG
ATGAATAGACGCAAGTTCCTGTATCAGTTTAAAAACGTGAGATGGGC
AAAAGGCCGACGAGAGACATATCTGTGCTATGTCGTTAAGCGCAGAG
ATTCAGCCACCAGTTTCTCTCTCGACTTCGGCTACCTGCGGAACAAG
AATGGTTGCCATGTTGAGCTCCTGTTCCTGAGGTATATCAGCGACTG
GGATTTGGACCCAGGGCGGTGCTATAGGGTGACATGGTTTACCTCCT
GGTCACCTTGTTATGACTGCGCGCGGCATGTTGCCGATTTTCTGAGA
GGGAACCCTAACCTGTCTCTGAGGATCTTCACCGCGCGACTGTACTT
CTGTGAGGACCGGAAAGCCGAACCCGAGGGACTGAGACGCCTCCACA
GAGCGGGTGTGCAGATTGCCATAATGACCTTTAAGGACTACTTCTAC
TGCTGGAACACCTTCGTCGAAAATCACGAGCGGACTTTCAAGGCTTG
GGAAGGATTGCATGAAAACAGCGTCAGGCTTTCCAGGCAGCTTCGCC
GCATTCTTCTCCCGTTGTACGAGGTTGATGACCTCAGAGATGCCTTT
AGAACACTGGGACTGTAGGCGGCCGCTCGATTGGTTTGGTGTGGCTC
TAA
rAPOBEC1 (mammalian)
(SEQ ID NO: 587)
CATCCTTGGTACCGAGCTCGGATCCAGCCACCATGAGCTCAGAGACT
GGCCCAGTGGCTGTGGACCCCACATTGAGACGGCGGATCGAGCCCCA
TGAGTTTGAGGTATTCTTCGATCCGAGAGAGCTCCGCAAGGAGACCT
GCCTGCTTTACGAAATTAATTGGGGGGGCCGGCACTCCATTTGGCGA
CATACATCACAGAACACTAACAAGCACGTCGAAGTCAACTTCATCGA
GAAGTTCACGACAGAAAGATATTTCTGTCCGAACACAAGGTGCAGCA
TTACCTGGTTTCTCAGCTGGAGCCCATGCGGCGAATGTAGTAGGGCC
ATCACTGAATTCCTGTCAAGGTATCCCCACGTCACTCTGTTTATTTA
CATCGCAAGGCTGTACCACCACGCTGACCCCCGCAATCGACAAGGCC
TGCGGGATTTGATCTCTTCAGGTGTGACTATCCAAATTATGACTGAG
CAGGAGTCAGGATACTGCTGGAGAAACTTTGTGAATTATAGCCCGAG
TAATGAAGCCCACTGGCCTAGGTATCCCCATCTGTGGGTACGACTGT
ACGTTCTTGAACTGTACTGCATCATACTGGGCCTGCCTCCTTGTCTC
AACATTCTGAGAAGGAAGCAGCCACAGCTGACATTCTTTACCATCGC
TCTTCAGTCTTGTCATTACCAGCGACTGCCCCCACACATTCTCTGGG
CCACCGGGTTGAAATGAGCGGCCGCTCGATTGGTTTGGTGTGGCTCT
AA
pmCDA1
(SEQ ID NO: 588)
CATCCTTGGTACCGAGCTCGGATCCAGCCACCATGACAGACGCTGAA
TATGTTAGGATCCATGAAAAACTGGATATCTATACATTTAAGAAGCA
GTTCTTCAATAACAAAAAGTCAGTATCTCACAGATGCTATGTCCTGT
TCGAACTCAAGAGAAGAGGAGAAAGGCGGGCCTGTTTCTGGGGGTAC
GCGGTTAATAAACCCCAGTCCGGGACCGAGAGGGGGATTCACGCCGA
GATCTTTTCAATTAGGAAGGTTGAAGAGTATCTTCGCGACAATCCCG
GTCAGTTCACAATTAACTGGTACAGCTCCTGGAGCCCTTGCGCTGAT
TGCGCCGAGAAAATACTGGAATGGTACAACCAGGAGTTGAGAGGCAA
TGGCGACACTCTCAAGATTTGGGCTTGCAAGCTTTACTACGAGAAGA
ACGCGAGAAATCAGATTGGCTTGTGGAACCTCAGGGACAACGGGGTC
GGGTTGAATGTTATGGTGTCCGAACATTACCAGTGCTGTAGAAAGAT
CTTCATTCAGTCCAGTCACAATCAGCTGAACGAGAACAGATGGCTGG
AGAAAACACTGAAACGGGCAGAGAAAAGGCGCTCAGAGCTGAGTATC
ATGATCCAGGTCAAAATCCTGCATACAACCAAAAGCCCGGCTGTATA
AGCGGCCGCTCGATTGGTTTGGTGTGGCTCTAA
haPOBEC3G
(SEQ ID NO: 589)
CATCCTTGGTACCGAGCTCGGATCCAGCCACCATGGAGCTGAAGTAT
CACCCTGAGATGCGGTTTTTCCACTGGTTTAGTAAGTGGCGCAAACT
TCATCGGGATCAGGAGTATGAAGTGACCTGGTATATCTCTTGGTCTC
CCTGCACAAAATGTACACGCGACATGGCCACATTTCTGGCCGAGGAT
CCAAAGGTGACGCTCACAATCTTTGTGGCCCGCCTGTATTATTTCTG
GGACCCGGATTATCAGGAGGCACTTAGGTCATTGTGCCAAAAGCGCG
ACGGACCAGGGGCGACTATGAAAATCATGAATTATGACGAATTCCAG
CATTGCTGGAGTAAGTTTGTGTACAGCCAGCGGGAGCTGTTCGAGCC
CTGGAACAATCTTCCCAAGTACTACATACTGCTTCACATTATGTTGG
GGGAGATCCTTCGGCACTCTATGGATCCTCCTACCTTTACGTTTAAC
TTTAATAATGAGCCTTGGGTTCGGGGGCGCCATGAAACCTATTTGTG
CTACGAGGTCGAGCGGATGCATAATGATACGTGGGTCCTGCTGAATC
AGAGGAGGGGGTTTCTGTGTAACCAGGCTCCACATAAACATGGATTT
CTCGAGGGGCGGCACGCCGAACTGTGTTTCCTTGATGTGATACCTTT
CTGGAAGCTCGACCTTGATCAAGATTACAGGGTGACGTGTTTCACCT
CCTGGTCACCCTGCTTCAGTTGCGCCCAAGAGATGGCTAAATTTATC
AGTAAGAACAAGCATGTGTCCCTCTGTATTTTTACAGCCAGAATTTA
TGATGACCAGGGCCGGTGCCAGGAGGGGCTGCGGACACTCGCTGAGG
GGGGCGCGAAGATCAGCATAATGACATACTCCGAATTCAAACACTGT
TGGGACACTTTTGTGGACCACCAGGGCTGCCCATTTCAGCCGTGGGA
TGGGCTCGACGAACATAGTCAGGATCTCTCAGGCCGGCTGCGAGCCA
TATTGCAGAACCAGGAGAATTAGGCGGCCGCTCGATTGGTTTGGTGT
GGCTCTAA
rAPOBEC1(E. Coli)
(SEQ ID NO: 590)
GGCCGGGGATTCTAGAAATAATTTTGTTTAACTTTAAGAAGGAGATA
TACCATGGATGTCTTCTGAAACCGGTCCGGTTGCGGTTGACCCGACC
CTGCGTCGTCGTATCGAACCGCACGAATTCGAAGTTTTCTTCGACCC
GCGTGAACTGCGTAAAGAAACCTGCCTGCTGTACGAAATCAACTGGG
GTGGTCGTCACTCTATCTGGGGTCACACCTCTCAGAAGACCAACAAA
CACGTTGAAGTTAACTTCATCGAAAAATTCACCACCGAACGTTACTT
CTGCCCGAACACCCGTTGCTCTATCACCTGGTTCCTGTCTTGGTCTC
CGTGCGGTGAATGCTCTCGTGCGATCACCGAATTCCTGTCTCGTTAC
CCGCACGTTACCCTGTTCATCTACATCGCGCGTCTGTACCACCACGC
GGACCCGCGTAACCGTCAGGGTCTGCGTGACCTGATCTCTTCTGGTG
TTACCATCCAGATCATGACCGAACAGGAATCTGGTTACTGCTGGCGT
AACTTCGTTAACTACTCTCCGTCTAACGAAGCGCACTGGCCGCGTTA
CCCGCACCTGTGGGTTCGTCTGTACGTTCTGGAACTGTACTGCATCA
TCCTGGGTCTGCCGCCGTGCCTGAACATCCTGCGTCGTAAACAGCCG
CAGCTGACCTTCTTCACCATCGCGCTGCAGTCTTGCCACTACCAGCG
TCTGCCGCCGCACATCCTGTGGGCGACCGGTCTGAAAGGTGGTAGTG
GAGGGAGCGGCGGTTCAATGGATAAGAAATAC

### Amino Acid Sequences of NBE1, NBE2, and NBE3.

NBE1 for E. Coli expression (His₆-rAPOBEC1-XTEN-dCas9)
(SEQ ID NO: 591)
MGSSHHHHHHMSSETGPVAVDPTLRRRIEPHEFEVFFDPRELRKETCLLYEINWGGRHSIWRHTSQNTN
KHVEVNFIEKFTTERYFCPNTRCSITWFLSWSPCGECSRAITEFLSRYPHVTLFIYIARLYHHADPRNRQGL
RDLISSGVTIQIMTEQESGYCWRNFVNYSPSNEAHWPRYPHLWVRLYVLELYCIILGLPPCLNILRRKQPQ
LTFFTIALQSCHYQRLPPHILWATGLKSGSETPGTSESATPESDKKYSIGLAIGTNSVGWAVITDEYKVPSK
KFKVLGNTDRHSIKKNLIGALLFDSGETAEATRLKRTARRRYTRRKNRICYLQEIFSNEMAKVDDSFFHRL
EESFLVEEDKKHERHPIFGNIVDEVAYHEKYPTIYHLRKKLVDSTDKADLRLIYLALAHMIKFRGHFLIEGDL
NPDNSDVDKLFIQLVQTYNQLFEENPINASGVDAKAILSARLSKSRRLENLIAQLPGEKKNGLFGNLIALSL
GLTPNFKSNFDLAEDAKLQLSKDTYDDDLDNLLAQIGDQYADLFLAAKNLSDAILLSDILRVNTEITKAPLSA
SMIKRYDEHHQDLTLLKALVRQQLPEKYKEIFFDQSKNGYAGYIDGGASQEEFYKFIKPILEKMDGTEELL
VKLNREDLLRKQRTFDNGSIPHQIHLGELHAILRRQEDFYPFLKDNREKIEKILTFRIPYYVGPLARGNSRF
AWMTRKSEETITPWNFEEVVDKGASAQSFIERMTNFDKNLPNEKVLPKHSLLYEYFTVYNELTKVKYVTE
GMRKPAFLSGEQKKAIVDLLFKTNRKVTVKQLKEDYFKKIECFDSVEISGVEDRFNASLGTYHDLLKIIKDK
DFLDNEENEDILEDIVLTLTLFEDREMIEERLKTYAHLFDDKVMKQLKRRRYTGWGRLSRKLINGIRDKQS
GKTILDFLKSDGFANRNFMQLIHDDSLTFKEDIQKAQVSGQGDSLHEHIANLAGSPAIKKGILQTVKVVDEL
VKVMGRHKPENIVIEMARENQTTQKGQKNSRERMKRIEEGIKELGSQILKEHPVENTQLQNEKLYLYYLQ
NGRDMYVDQELDINRLSDYDVDAIVPQSFLKDDSIDNKVLTRSDKNRGKSDNVPSEEVVKKMKNYWRQL
LNAKLITQRKFDNLTKAERGGLSELDKAGFIKRQLVETRQITKHVAQILDSRMNTKYDENDKLIREVKVITLK
SKLVSDFRKDFQFYKVREINNYHHAHDAYLNAVVGTALIKKYPKLESEFVYGDYKVYDVRKMIAKSEQEIG
KATAKYFFYSNIMNFFKTEITLANGEIRKRPLIETNGETGEIVWDKGRDFATVRKVLSMPQVNIVKKTEVQT
GGFSKESILPKRNSDKLIARKKDWDPKKYGGFDSPTVAYSVLVVAKVEKGKSKKLKSVKELLGITIMERSS
FEKNPIDFLEAKGYKEVKKDLIIKLPKYSLFELENGRKRMLASAGELQKGNELALPSKYVNFLYLASHYEKL
KGSPEDNEQKQLFVEQHKHYLDEIIEQISEFSKRVILADANLDKVLSAYNKHRDKPIREQAENIIHLFTLTNL
GAPAAFKYFDTTIDRKRYTSTKEVLDATLIHQSITGLYETRIDLSQLGGDSGGSPKKKRKV
NBE1 for Mammalian expression (rAPOBEC1-XTEN-dCas9-NLS)
(SEQ ID NO: 592)
MSSETGPVAVDPTLRRRIEPHEFEVFFDPRELRKETCLLYEINWGGRHSIWRHTSQNTNKHVEVNFIEKF
TTERYFCPNTRCSITWFLSWSPCGECSRAITEFLSRYPHVTLFIYIARLYHHADPRNRQGLRDLISSGVTIQ
IMTEQESGYCWRNFVNYSPSNEAHWPRYPHLWVRLYVLELYCIILGLPPCLNILRRKQPOLTFFTIALQSC
HYQRLPPHILWATGLKSGSETPGTSESATPESDKKYSIGLAIGTNSVGWAVITDEYKVPSKKFKVLGNTDR
HSIKKNLIGALLFDSGETAEATRLKRTARRRYTRRKNRICYLQEIFSNEMAKVDDSFFHRLEESFLVEEDKK
HERHPIFGNIVDEVAYHEKYPTIYHLRKKLVDSTDKADLRLIYLALAHMIKFRGHFLIEGDLNPDNSDVDKLF
IQLVQTYNQLFEENPINASGVDAKAILSARLSKSRRLENLIAQLPGEKKNGLFGNLIALSLGLTPNFKSNFDL
AEDAKLQLSKDTYDDDLDNLLAQIGDQYADLFLAAKNLSDAILLSDILRVNTEITKAPLSASMIKRYDEHHQ
DLTLLKALVRQQLPEKYKEIFFDQSKNGYAGYIDGGASQEEFYKFIKPILEKMDGTEELLVKLNREDLLRKQ
RTFDNGSIPHOIHLGELHAILRRQEDFYPFLKDNREKIEKILTFRIPYYVGPLARGNSRFAWMTRKSEETITP
WNFEEVVDKGASAQSFIERMTNFDKNLPNEKVLPKHSLLYEYFTVYNELTKVKYVTEGMRKPAFLSGEQ
KKAIVDLLFKTNRKVTVKQLKEDYFKKIECFDSVEISGVEDRFNASLGTYHDLLKIIKDKDFLDNEENEDILE
DIVLTLTLFEDREMIEERLKTYAHLFDDKVMKQLKRRRYTGWGRLSRKLINGIRDKQSGKTILDFLKSDGFA
NRNFMQLIHDDSLTFKEDIQKAQVSGQGDSLHEHIANLAGSPAIKKGILQTVKVVDELVKVMGRHKPENIVI
EMARENQTTQKGQKNSRERMKRIEEGIKELGSQILKEHPVENTQLQNEKLYLYYLQNGRDMYVDQELDI
NRLSDYDVDAIVPQSFLKDDSIDNKVLTRSDKNRGKSDNVPSEEVVKKMKNYWRQLLNAKLITQRKFDNL
TKAERGGLSELDKAGFIKRQLVETRQITKHVAQILDSRMNTKYDENDKLIREVKVITLKSKLVSDFRKDFQF
YKVREINNYHHAHDAYLNAVVGTALIKKYPKLESEFVYGDYKVYDVRKMIAKSEQEIGKATAKYFFYSNIM
NFFKTEITLANGEIRKRPLIETNGETGEIVWDKGRDFATVRKVLSMPQVNIVKKTEVQTGGFSKESILPKRN
SDKLIARKKDWDPKKYGGFDSPTVAYSVLVVAKVEKGKSKKLKSVKELLGITIMERSSFEKNPIDFLEAKG
YKEVKKDLIIKLPKYSLFELENGRKRMLASAGELQKGNELALPSKYVNFLYLASHYEKLKGSPEDNEQKQL
FVEQHKHYLDEIIEQISEFSKRVILADANLDKVLSAYNKHRDKPIREQAENIIHLFTLTNLGAPAAFKYFDTTI
DRKRYTSTKEVLDATLIHQSITGLYETRIDLSQLGGDSGGSPKKKRKV
Alternative NBE1 for Mammalian expression with human APOBEC1 (hAPOBEC1-
XTEN-dCas9-NLS)
(SEQ ID NO: 5737)
MTSEKGPSTGDPTLRRRIEPWEFDVFYDPRELRKEACLLYEIKWGMSRKIWRSSGKNTTN
HVEVNFIKKFTSERDFHPSMSCSITWFLSWSPCWECSQAIREFLSRHPGVTLVIYVARLFW
HMDQQNRQGLRDLVNSGVTIQIMRASEYYHCWRNFVNYPPGDEAHWPQYPPLWMMLY
ALELHCIILSLPPCLKISRRWQNHLTFFRLHLQNCHYQTIPPHILLATGLIHPSVAWRGSETP
GTSESATPESDKKYSIGLAIGTNSVGWAVITDEYKVPSKKFKVLGNTDRHSIKKNLIGALL
FDSGETAEATRLKRTARRRYTRRKNRICYLQEIFSNEMAKVDDSFFHRLEESFLVEEDKK
HERHPIFGNIVDEVAYHEKYPTIYHLRKKLVDSTDKADLRLIYLALAHMIKFRGHFLIEGD
LNPDNSDVDKLFIQLVQTYNQLFEENPINASGVDAKAILSARLSKSRRLENLIAQLPGEKK
NGLFGNLIALSLGLTPNFKSNFDLAEDAKLQLSKDTYDDDLDNLLAQIGDQYADLFLAA
KNLSDAILLSDILRVNTEITKAPLSASMIKRYDEHHQDLTLLKALVRQQLPEKYKEIFFDQ
SKNGYAGYIDGGASQEEFYKFIKPILEKMDGTEELLVKLNREDLLRKQRTFDNGSIPHQIH
LGELHAILRRQEDFYPFLKDNREKIEKILTFRIPYYVGPLARGNSRFAWMTRKSEETITPW
NFEEVVDKGASAQSFIERMTNFDKNLPNEKVLPKHSLLYEYFTVYNELTKVKYVTEGMR
KPAFLSGEQKKAIVDLLFKTNRKVTVKQLKEDYFKKIECFDSVEISGVEDRFNASLGTYH
DLLKIIKDKDFLDNEENEDILEDIVLTLTLFEDREMIEERLKTYAHLFDDKVMKQLKRRRY
TGWGRLSRKLINGIRDKQSGKTILDFLKSDGFANRNFMQLIHDDSLTFKEDIQKAQVSGQ
GDSLHEHIANLAGSPAIKKGILQTVKVVDELVKVMGRHKPENIVIEMARENQTTQKGQK
NSRERMKRIEEGIKELGSQILKEHPVENTQLQNEKLYLYYLQNGRDMYVDQELDINRLSD
YDVDAIVPQSFLKDDSIDNKVLTRSDKNRGKSDNVPSEEVVKKMKNYWRQLLNAKLITQ
RKFDNLTKAERGGLSELDKAGFIKRQLVETRQITKHVAQILDSRMNTKYDENDKLIREVK
VITLKSKLVSDFRKDFQFYKVREINNYHHAHDAYLNAVVGTALIKKYPKLESEFVYGDY
KVYDVRKMIAKSEQEIGKATAKYFFYSNIMNFFKTEITLANGEIRKRPLIETNGETGEIVW
DKGRDFATVRKVLSMPQVNIVKKTEVQTGGFSKESILPKRNSDKLIARKKDWDPKKYGG
FDSPTVAYSVLVVAKVEKGKSKKLKSVKELLGITIMERSSFEKNPIDFLEAKGYKEVKKD
LIIKLPKYSLFELENGRKRMLASAGELQKGNELALPSKYVNFLYLASHYEKLKGSPEDNE
QKQLFVEQHKHYLDEIIEQISEFSKRVILADANLDKVLSAYNKHRDKPIREQAENIIHLFTL
TNLGAPAAFKYFDTTIDRKRYTSTKEVLDATLIHQSITGLYETRIDLSQLGGDSGGSPKKK
RKV
NBE2 (rAPOBEC1-XTEN-dCas9-UGI-NLS)
(SEQ ID NO: 593)
MSSETGPVAVDPTLRRRIEPHEFEVFFDPRELRKETCLLYEINWGGRHSIWRHTSQNTNKHVEVNFIEKF
TTERYFCPNTRCSITWFLSWSPCGECSRAITEFLSRYPHVTLFIYIARLYHHADPRNRQGLRDLISSGVTIQ
IMTEQESGYCWRNFVNYSPSNEAHWPRYPHLWVRLYVLELYCIILGLPPCLNILRRKOPQLTFFTIALQSC
HYQRLPPHILWATGLKSGSETPGTSESATPESDKKYSIGLAIGTNSVGWAVITDEYKVPSKKFKVLGNTDR
HSIKKNLIGALLFDSGETAEATRLKRTARRRYTRRKNRICYLQEIFSNEMAKVDDSFFHRLEESFLVEEDKK
HERHPIFGNIVDEVAYHEKYPTIYHLRKKLVDSTDKADLRLIYLALAHMIKFRGHFLIEGDLNPDNSDVDKLF
IQLVQTYNQLFEENPINASGVDAKAILSARLSKSRRLENLIAQLPGEKKNGLFGNLIALSLGLTPNFKSNFDL
AEDAKLQLSKDTYDDDLDNLLAQIGDQYADLFLAAKNLSDAILLSDILRVNTEITKAPLSASMIKRYDEHHQ
DLTLLKALVRQQLPEKYKEIFFDQSKNGYAGYIDGGASQEEFYKFIKPILEKMDGTEELLVKLNREDLLRKQ
RTFDNGSIPHQIHLGELHAILRRQEDFYPFLKDNREKIEKILTFRIPYYVGPLARGNSRFAWMTRKSEETITP
WNFEEVVDKGASAQSFIERMTNFDKNLPNEKVLPKHSLLYEYFTVYNELTKVKYVTEGMRKPAFLSGEQ
KKAIVDLLFKTNRKVTVKOLKEDYFKKIECFDSVEISGVEDRFNASLGTYHDLLKIIKDKDFLDNEENEDILE
DIVLTLTLFEDREMIEERLKTYAHLFDDKVMKQLKRRRYTGWGRLSRKLINGIRDKQSGKTILDFLKSDGFA
NRNFMQLIHDDSLTFKEDIQKAQVSGQGDSLHEHIANLAGSPAIKKGILQTVKVVDELVKVMGRHKPENIVI
EMARENQTTQKGQKNSRERMKRIEEGIKELGSQILKEHPVENTQLQNEKLYLYYLONGRDMYVDQELDI
NRLSDYDVDAIVPQSFLKDDSIDNKVLTRSDKNRGKSDNVPSEEVVKKMKNYWRQLLNAKLITQRKFDNL
TKAERGGLSELDKAGFIKRQLVETRQITKHVAQILDSRMNTKYDENDKLIREVKVITLKSKLVSDFRKDFQF
YKVREINNYHHAHDAYLNAVVGTALIKKYPKLESEFVYGDYKVYDVRKMIAKSEQEIGKATAKYFFYSNIM
NFFKTEITLANGEIRKRPLIETNGETGEIVWDKGRDFATVRKVLSMPQVNIVKKTEVQTGGFSKESILPKRN
SDKLIARKKDWDPKKYGGFDSPTVAYSVLVVAKVEKGKSKKLKSVKELLGITIMERSSFEKNPIDFLEAKG
YKEVKKDLIIKLPKYSLFELENGRKRMLASAGELQKGNELALPSKYVNFLYLASHYEKLKGSPEDNEQKQL
FVEQHKHYLDEIIEQISEFSKRVILADANLDKVLSAYNKHRDKPIREQAENIIHLFTLTNLGAPAAFKYFDTTI
DRKRYTSTKEVLDATLIHQSITGLYETRIDLSQLGGDSGGSTNLSDIIEKETGKQLVIQESILMLPEEVEEVIG
NKPESDILVHTAYDESTDENVMLLTSDAPEYKPWALVIQDSNGENKIKMLSGGSPKKKRKV
NBE3 (rAPOBEC1-XTEN-Cas9n-UGI-NLS)
(SEQ ID NO: 594)
MSSETGPVAVDPTLRRRIEPHEFEVFFDPRELRKETCLLYEINWGGRHSIWRHTSQNTNKHVEVNFIEKF
TTERYFCPNTRCSITWFLSWSPCGECSRAITEFLSRYPHVTLFIYIARLYHHADPRNRQGLRDLISSGVTIQ
IMTEQESGYCWRNFVNYSPSNEAHWPRYPHLWVRLYVLELYCIILGLPPCLNILRRKQPQLTFFTIALQSC
HYQRLPPHILWATGLKSGSETPGTSESATPESDKKYSIGLAIGTNSVGWAVITDEYKVPSKKFKVLGNTDR
HSIKKNLIGALLFDSGETAEATRLKRTARRRYTRRKNRICYLQEIFSNEMAKVDDSFFHRLEESFLVEEDKK
HERHPIFGNIVDEVAYHEKYPTIYHLRKKLVDSTDKADLRLIYLALAHMIKFRGHFLIEGDLNPDNSDVDKLF
IQLVQTYNQLFEENPINASGVDAKAILSARLSKSRRLENLIAQLPGEKKNGLFGNLIALSLGLTPNFKSNFDL
AEDAKLQLSKDTYDDDLDNLLAQIGDQYADLFLAAKNLSDAILLSDILRVNTEITKAPLSASMIKRYDEHHQ
DLTLLKALVRQQLPEKYKEIFFDQSKNGYAGYIDGGASQEEFYKFIKPILEKMDGTEELLVKLNREDLLRKQ
RTFDNGSIPHQIHLGELHAILRRQEDFYPFLKDNREKIEKILTFRIPYYVGPLARGNSRFAWMTRKSEETITP
WNFEEVVDKGASAQSFIERMTNFDKNLPNEKVLPKHSLLYEYFTVYNELTKVKYVTEGMRKPAFLSGEQ
KKAIVDLLFKTNRKVTVKQLKEDYFKKIECFDSVEISGVEDRFNASLGTYHDLLKIIKDKDFLDNEENEDILE
DIVLTLTLFEDREMIEERLKTYAHLFDDKVMKQLKRRRYTGWGRLSRKLINGIRDKQSGKTILDFLKSDGFA
NRNFMQLIHDDSLTFKEDIQKAQVSGQGDSLHEHIANLAGSPAIKKGILQTVKVVDELVKVMGRHKPENIVI
EMARENQTTQKGQKNSRERMKRIEEGIKELGSQILKEHPVENTQLQNEKLYLYYLQNGRDMYVDQELDI
NRLSDYDVDHIVPQSFLKDDSIDNKVLTRSDKNRGKSDNVPSEEVVKKMKNYWRQLLNAKLITQRKFDNL
TKAERGGLSELDKAGFIKRQLVETRQITKHVAQILDSRMNTKYDENDKLIREVKVITLKSKLVSDFRKDFQF
YKVREINNYHHAHDAYLNAVVGTALIKKYPKLESEFVYGDYKVYDVRKMIAKSEQEIGKATAKYFFYSNIM
NFFKTEITLANGEIRKRPLIETNGETGEIVWDKGRDFATVRKVLSMPQVNIVKKTEVQTGGFSKESILPKRN
SDKLIARKKDWDPKKYGGFDSPTVAYSVLVVAKVEKGKSKKLKSVKELLGITIMERSSFEKNPIDFLEAKG
YKEVKKDLIIKLPKYSLFELENGRKRMLASAGELQKGNELALPSKYVNFLYLASHYEKLKGSPEDNEQKQL
FVEQHKHYLDEIIEQISEFSKRVILADANLDKVLSAYNKHRDKPIREQAENIIHLFTLTNLGAPAAFKYFDTTI
DRKRYTSTKEVLDATLIHQSITGLYETRIDLSQLGGDSGGSTNLSDIIEKETGKQLVIQESILMLPEEVEEVIG
NKPESDILVHTAYDESTDENVMLLTSDAPEYKPWALVIQDSNGENKIKMLSGGSPKKKRKV
pmCDA1-XTEN-dCas9-UGI (bacteria)
(SEQ ID NO: 5742)
MTDAEYVRIHEKLDIYTFKKQFFNNKKSVSHRCYVLFELKRRGERRACFWGYAVNKPQS
GTERGIHAEIFSIRKVEEYLRDNPGQFTINWYSSWSPCADCAEKILEWYNQELRGNGHTL
KIWACKLYYEKNARNQIGLWNLRDNGVGLNVMVSEHYQCCRKIFIQSSHNQLNENRWL
EKTLKRAEKRRSELSIMIQVKILHTTKSPAVSGSETPGTSESATPESDKKYSIGLAIGTNSV
GWAVITDEYKVPSKKFKVLGNTDRHSIKKNLIGALLFDSGETAEATRLKRTARRRYTRRK
NRICYLQEIFSNEMAKVDDSFFHRLEESFLVEEDKKHERHPIFGNIVDEVAYHEKYPTIYH
LRKKLVDSTDKADLRLIYLALAHMIKFRGHFLIEGDLNPDNSDVDKLFIQLVQTYNQLFE
ENPINASGVDAKAILSARLSKSRRLENLIAQLPGEKKNGLFGNLIALSLGLTPNFKSNFDLA
EDAKLQLSKDTYDDDLDNLLAQIGDQYADLFLAAKNLSDAILLSDILRVNTEITKAPLSAS
MIKRYDEHHQDLTLLKALVRQQLPEKYKEIFFDQSKNGYAGYIDGGASQEEFYKFIKPILE
KMDGTEELLVKLNREDLLRKQRTFDNGSIPHQIHLGELHAILRRQEDFYPFLKDNREKIEK
ILTFRIPYYVGPLARGNSRFAWMTRKSEETITPWNFEEVVDKGASAQSFIERMTNFDKNLP
NEKVLPKHSLLYEYFTVYNELTKVKYVTEGMRKPAFLSGEQKKAIVDLLFKTNRKVTVK
QLKEDYFKKIECFDSVEISGVEDRFNASLGTYHDLLKIIKDKDFLDNEENEDILEDIVLTLT
LFEDREMIEERLKTYAHLFDDKVMKQLKRRRYTGWGRLSRKLINGIRDKQSGKTILDFLK
SDGFANRNFMQLIHDDSLTFKEDIQKAQVSGQGDSLHEHIANLAGSPAIKKGILQTVKVV
DELVKVMGRHKPENIVIEMARENQTTQKGQKNSRERMKRIEEGIKELGSQILKEHPVENT
QLQNEKLYLYYLQNGRDMYVDQELDINRLSDYDVDAIVPQSFLKDDSIDNKVLTRSDKN
RGKSDNVPSEEVVKKMKNYWRQLLNAKLITQRKFDNLTKAERGGLSELDKAGFIKRQL
VETRQITKHVAQILDSRMNTKYDENDKLIREVKVITLKSKLVSDFRKDFQFYKVREINNY
HHAHDAYLNAVVGTALIKKYPKLESEFVYGDYKVYDVRKMIAKSEQEIGKATAKYFFYS
NIMNFFKTEITLANGEIRKRPLIETNGETGEIVWDKGRDFATVRKVLSMPQVNIVKKTEVQ
TGGFSKESILPKRNSDKLIARKKDWDPKKYGGFDSPTVAYSVLVVAKVEKGKSKKLKSV
KELLGITIMERSSFEKNPIDFLEAKGYKEVKKDLIIKLPKYSLFELENGRKRMLASAGELQ
KGNELALPSKYVNFLYLASHYEKLKGSPEDNEQKQLFVEQHKHYLDEIIEQISEFSKRVIL
ADANLDKVLSAYNKHRDKPIREQAENIIHLFTLTNLGAPAAFKYFDTTIDRKRYTSTKEV
LDATLIHQSITGLYETRIDLSQLGGDSGGSMTNLSDIIEKETGKQLVIQESILMLPEEVEEVI
GNKPESDILVHTAYDESTDENVMLLTSDAPEYKPWALVIQDSNGENKIKML
pmCDA1-XTEN-nCas9-UGI-NLS (mammalian construct)
(SEQ ID NO: 5743)
MTDAEYVRIHEKLDIYTFKKQFFNNKKSVSHRCYVLFELKRRGERRACFWGYAVNKPQS
GTERGIHAEIFSIRKVEEYLRDNPGQFTINWYSSWSPCADCAEKILEWYNQELRGNGHTL
KIWACKLYYEKNARNQIGLWNLRDNGVGLNVMVSEHYQCCRKIFIQSSHNQLNENRWL
EKTLKRAEKRRSELSIMIQVKILHTTKSPAVSGSETPGTSESATPESDKKYSIGLAIGTNSV
GWAVITDEYKVPSKKFKVLGNTDRHSIKKNLIGALLFDSGETAEATRLKRTARRRYTRRK
NRICYLQEIFSNEMAKVDDSFFHRLEESFLVEEDKKHERHPIFGNIVDEVAYHEKYPTIYH
LRKKLVDSTDKADLRLIYLALAHMIKFRGHFLIEGDLNPDNSDVDKLFIQLVQTYNQLFE
ENPINASGVDAKAILSARLSKSRRLENLIAQLPGEKKNGLFGNLIALSLGLTPNFKSNFDLA
EDAKLQLSKDTYDDDLDNLLAQIGDQYADLFLAAKNLSDAILLSDILRVNTEITKAPLSAS
MIKRYDEHHQDLTLLKALVRQQLPEKYKEIFFDQSKNGYAGYIDGGASQEEFYKFIKPILE
KMDGTEELLVKLNREDLLRKQRTFDNGSIPHQIHLGELHAILRRQEDFYPFLKDNREKIEK
ILTFRIPYYVGPLARGNSRFAWMTRKSEETITPWNFEEVVDKGASAQSFIERMTNFDKNLP
NEKVLPKHSLLYEYFTVYNELTKVKYVTEGMRKPAFLSGEQKKAIVDLLFKTNRKVTVK
QLKEDYFKKIECFDSVEISGVEDRFNASLGTYHDLLKIIKDKDFLDNEENEDILEDIVLTLT
LFEDREMIEERLKTYAHLFDDKVMKQLKRRRYTGWGRLSRKLINGIRDKQSGKTILDFLK
SDGFANRNFMQLIHDDSLTFKEDIQKAQVSGQGDSLHEHIANLAGSPAIKKGILQTVKVV
DELVKVMGRHKPENIVIEMARENQTTQKGQKNSRERMKRIEEGIKELGSQILKEHPVENT
QLQNEKLYLYYLQNGRDMYVDQELDINRLSDYDVDHIVPQSFLKDDSIDNKVLTRSDKN
RGKSDNVPSEEVVKKMKNYWRQLLNAKLITQRKFDNLTKAERGGLSELDKAGFIKRQL
VETRQITKHVAQILDSRMNTKYDENDKLIREVKVITLKSKLVSDFRKDFQFYKVREINNY
HHAHDAYLNAVVGTALIKKYPKLESEFVYGDYKVYDVRKMIAKSEQEIGKATAKYFFYS
NIMNFFKTEITLANGEIRKRPLIETNGETGEIVWDKGRDFATVRKVLSMPQVNIVKKTEVQ
TGGFSKESILPKRNSDKLIARKKDWDPKKYGGFDSPTVAYSVLVVAKVEKGKSKKLKSV
KELLGITIMERSSFEKNPIDFLEAKGYKEVKKDLIIKLPKYSLFELENGRKRMLASAGELQ
KGNELALPSKYVNFLYLASHYEKLKGSPEDNEQKQLFVEQHKHYLDEIIEQISEFSKRVIL
ADANLDKVLSAYNKHRDKPIREQAENIIHLFTLTNLGAPAAFKYFDTTIDRKRYTSTKEV
LDATLIHQSITGLYETRIDLSQLGGDSGGSTNLSDIIEKETGKQLVIQESILMLPEEVEEVIG
NKPESDILVHTAYDESTDENVMLLTSDAPEYKPWALVIQDSNGENKIKMLSGGSPKKKR
KV
huAPOBEC3G-XTEN-dCas9-UGI (bacteria)
(SEQ ID NO: 5744)
MDPPTFTFNFNNEPWVRGRHETYLCYEVERMHNDTWVLLNQRRGFLCNQAPHKHGFLE
GRHAELCFLDVIPFWKLDLDQDYRVTCFTSWSPCFSCAQEMAKFISKNKHVSLCIFTARIY
DDQGRCQEGLRTLAEAGAKISIMTYSEFKHCWDTFVDHQGCPFQPWDGLDEHSQDLSGR
LRAILQSGSETPGTSESATPESDKKYSIGLAIGTNSVGWAVITDEYKVPSKKFKVLGNTDR
HSIKKNLIGALLFDSGETAEATRLKRTARRRYTRRKNRICYLQEIFSNEMAKVDDSFFHRL
EESFLVEEDKKHERHPIFGNIVDEVAYHEKYPTIYHLRKKLVDSTDKADLRLIYLALAHMI
KFRGHFLIEGDLNPDNSDVDKLFIQLVQTYNQLFEENPINASGVDAKAILSARLSKSRRLE
NLIAQLPGEKKNGLFGNLIALSLGLTPNFKSNFDLAEDAKLQLSKDTYDDDLDNLLAQIG
DQYADLFLAAKNLSDAILLSDILRVNTEITKAPLSASMIKRYDEHHQDLTLLKALVRQQL
PEKYKEIFFDQSKNGYAGYIDGGASQEEFYKFIKPILEKMDGTEELLVKLNREDLLRKQRT
FDNGSIPHQIHLGELHAILRRQEDFYPFLKDNREKIEKILTFRIPYYVGPLARGNSRFAWMT
RKSEETITPWNFEEVVDKGASAQSFIERMTNFDKNLPNEKVLPKHSLLYEYFTVYNELTK
VKYVTEGMRKPAFLSGEQKKAIVDLLFKTNRKVTVKQLKEDYFKKIECFDSVEISGVEDR
FNASLGTYHDLLKIIKDKDFLDNEENEDILEDIVLTLTLFEDREMIEERLKTYAHLFDDKV
MKQLKRRRYTGWGRLSRKLINGIRDKQSGKTILDFLKSDGFANRNFMQLIHDDSLTFKED
IQKAQVSGQGDSLHEHIANLAGSPAIKKGILQTVKVVDELVKVMGRHKPENIVIEMAREN
QTTQKGQKNSRERMKRIEEGIKELGSQILKEHPVENTQLQNEKLYLYYLQNGRDMYVDQ
ELDINRLSDYDVDAIVPQSFLKDDSIDNKVLTRSDKNRGKSDNVPSEEVVKKMKNYWRQ
LLNAKLITQRKFDNLTKAERGGLSELDKAGFIKRQLVETRQITKHVAQILDSRMNTKYDE
NDKLIREVKVITLKSKLVSDFRKDFQFYKVREINNYHHAHDAYLNAVVGTALIKKYPKLE
SEFVYGDYKVYDVRKMIAKSEQEIGKATAKYFFYSNIMNFFKTEITLANGEIRKRPLIETN
GETGEIVWDKGRDFATVRKVLSMPQVNIVKKTEVQTGGFSKESILPKRNSDKLIARKKD
WDPKKYGGFDSPTVAYSVLVVAKVEKGKSKKLKSVKELLGITIMERSSFEKNPIDFLEAK
GYKEVKKDLIIKLPKYSLFELENGRKRMLASAGELQKGNELALPSKYVNFLYLASHYEKL
KGSPEDNEQKQLFVEQHKHYLDEIIEQISEFSKRVILADANLDKVLSAYNKHRDKPIREQA
ENIIHLFTLTNLGAPAAFKYFDTTIDRKRYTSTKEVLDATLIHQSITGLYETRIDLSQLGGD
SGGSMTNLSDIIEKETGKQLVIQESILMLPEEVEEVIGNKPESDILVHTAYDESTDENVMLL
TSDAPEYKPWALVIQDSNGENKIKML
huAPOBEC3G-XTEN-nCas9-UGI-NLS (mammalian construct)
(SEQ ID NO: 5745)
MDPPTFTFNFNNEPWVRGRHETYLCYEVERMHNDTWVLLNQRRGFLCNQAPHKHGFLE
GRHAELCFLDVIPFWKLDLDQDYRVTCFTSWSPCFSCAQEMAKFISKNKHVSLCIFTARIY
DDQGRCQEGLRTLAEAGAKISIMTYSEFKHCWDTFVDHQGCPFQPWDGLDEHSQDLSGR
LRAILQSGSETPGTSESATPESDKKYSIGLAIGTNSVGWAVITDEYKVPSKKFKVLGNTDR
HSIKKNLIGALLFDSGETAEATRLKRTARRRYTRRKNRICYLQEIFSNEMAKVDDSFFHRL
EESFLVEEDKKHERHPIFGNIVDEVAYHEKYPTIYHLRKKLVDSTDKADLRLIYLALAHMI
KFRGHFLIEGDLNPDNSDVDKLFIQLVQTYNQLFEENPINASGVDAKAILSARLSKSRRLE
NLIAQLPGEKKNGLFGNLIALSLGLTPNFKSNFDLAEDAKLQLSKDTYDDDLDNLLAQIG
DQYADLFLAAKNLSDAILLSDILRVNTEITKAPLSASMIKRYDEHHQDLTLLKALVRQQL
PEKYKEIFFDQSKNGYAGYIDGGASQEEFYKFIKPILEKMDGTEELLVKLNREDLLRKQRT
FDNGSIPHQIHLGELHAILRRQEDFYPFLKDNREKIEKILTFRIPYYVGPLARGNSRFAWMT
RKSEETITPWNFEEVVDKGASAQSFIERMTNFDKNLPNEKVLPKHSLLYEYFTVYNELTK
VKYVTEGMRKPAFLSGEQKKAIVDLLFKTNRKVTVKQLKEDYFKKIECFDSVEISGVEDR
FNASLGTYHDLLKIIKDKDFLDNEENEDILEDIVLTLTLFEDREMIEERLKTYAHLFDDKV
MKQLKRRRYTGWGRLSRKLINGIRDKQSGKTILDFLKSDGFANRNFMQLIHDDSLTFKED
IQKAQVSGQGDSLHEHIANLAGSPAIKKGILQTVKVVDELVKVMGRHKPENIVIEMAREN
QTTQKGQKNSRERMKRIEEGIKELGSQILKEHPVENTQLQNEKLYLYYLQNGRDMYVDQ
ELDINRLSDYDVDHIVPQSFLKDDSIDNKVLTRSDKNRGKSDNVPSEEVVKKMKNYWRQ
LLNAKLITQRKFDNLTKAERGGLSELDKAGFIKRQLVETRQITKHVAQILDSRMNTKYDE
NDKLIREVKVITLKSKLVSDFRKDFQFYKVREINNYHHAHDAYLNAVVGTALIKKYPKLE
SEFVYGDYKVYDVRKMIAKSEQEIGKATAKYFFYSNIMNFFKTEITLANGEIRKRPLIETN
GETGEIVWDKGRDFATVRKVLSMPQVNIVKKTEVQTGGFSKESILPKRNSDKLIARKKD
WDPKKYGGFDSPTVAYSVLVVAKVEKGKSKKLKSVKELLGITIMERSSFEKNPIDFLEAK
GYKEVKKDLIIKLPKYSLFELENGRKRMLASAGELQKGNELALPSKYVNFLYLASHYEKL
KGSPEDNEQKQLFVEQHKHYLDEIIEQISEFSKRVILADANLDKVLSAYNKHRDKPIREQA
ENIIHLFTLTNLGAPAAFKYFDTTIDRKRYTSTKEVLDATLIHQSITGLYETRIDLSQLGGD
SGGSTNLSDIIEKETGKQLVIQESILMLPEEVEEVIGNKPESDILVHTAYDESTDENVMLLT
SDAPEYKPWALVIQDSNGENKIKMLSGGSPKKKRKV
huAPOBEC3G (D316R_D317R)-XTEN-nCas9-UGI-NLS (mammalian construct)
(SEQ ID NO: 5746)
MDPPTFTFNFNNEPWVRGRHETYLCYEVERMHNDTWVLLNORRGFLCNQAPHKHGFLE
GRHAELCFLDVIPFWKLDLDQDYRVTCFTSWSPCFSCAQEMAKFISKNKHVSLCIFTARIY
RRQGRCQEGLRTLAEAGAKISIMTYSEFKHCWDTFVDHQGCPFQPWDGLDEHSQDLSGR
LRAILQSGSETPGTSESATPESDKKYSIGLAIGTNSVGWAVITDEYKVPSKKFKVLGNTDR
HSIKKNLIGALLFDSGETAEATRLKRTARRRYTRRKNRICYLQEIFSNEMAKVDDSFFHRL
EESFLVEEDKKHERHPIFGNIVDEVAYHEKYPTIYHLRKKLVDSTDKADLRLIYLALAHMI
KFRGHFLIEGDLNPDNSDVDKLFIQLVQTYNQLFEENPINASGVDAKAILSARLSKSRRLE
NLIAQLPGEKKNGLFGNLIALSLGLTPNFKSNFDLAEDAKLQLSKDTYDDDLDNLLAQIG
DQYADLFLAAKNLSDAILLSDILRVNTEITKAPLSASMIKRYDEHHQDLTLLKALVRQQL
PEKYKEIFFDQSKNGYAGYIDGGASQEEFYKFIKPILEKMDGTEELLVKLNREDLLRKQRT
FDNGSIPHQIHLGELHAILRRQEDFYPFLKDNREKIEKILTFRIPYYVGPLARGNSRFAWMT
RKSEETITPWNFEEVVDKGASAQSFIERMTNFDKNLPNEKVLPKHSLLYEYFTVYNELTK
VKYVTEGMRKPAFLSGEQKKAIVDLLFKTNRKVTVKQLKEDYFKKIECFDSVEISGVEDR
FNASLGTYHDLLKIIKDKDFLDNEENEDILEDIVLTLTLFEDREMIEERLKTYAHLFDDKV
MKQLKRRRYTGWGRLSRKLINGIRDKQSGKTILDFLKSDGFANRNFMQLIHDDSLTFKED
IQKAQVSGQGDSLHEHIANLAGSPAIKKGILQTVKVVDELVKVMGRHKPENIVIEMAREN
QTTQKGQKNSRERMKRIEEGIKELGSQILKEHPVENTQLQNEKLYLYYLQNGRDMYVDQ
ELDINRLSDYDVDHIVPQSFLKDDSIDNKVLTRSDKNRGKSDNVPSEEVVKKMKNYWRQ
LLNAKLITQRKFDNLTKAERGGLSELDKAGFIKRQLVETRQITKHVAQILDSRMNTKYDE
NDKLIREVKVITLKSKLVSDFRKDFQFYKVREINNYHHAHDAYLNAVVGTALIKKYPKLE
SEFVYGDYKVYDVRKMIAKSEQEIGKATAKYFFYSNIMNFFKTEITLANGEIRKRPLIETN
GETGEIVWDKGRDFATVRKVLSMPQVNIVKKTEVQTGGFSKESILPKRNSDKLIARKKD
WDPKKYGGFDSPTVAYSVLVVAKVEKGKSKKLKSVKELLGITIMERSSFEKNPIDFLEAK
GYKEVKKDLIIKLPKYSLFELENGRKRMLASAGELQKGNELALPSKYVNFLYLASHYEKL
KGSPEDNEQKQLFVEQHKHYLDEIIEQISEFSKRVILADANLDKVLSAYNKHRDKPIREQA
ENIIHLFTLTNLGAPAAFKYFDTTIDRKRYTSTKEVLDATLIHQSITGLYETRIDLSQLGGD
SGGSTNLSDIIEKETGKQLVIQESILMLPEEVEEVIGNKPESDILVHTAYDESTDENVMLLT
SDAPEYKPWALVIQDSNGENKIKMLSGGSPKKKRKV

### Base Calling Matlab Script

(SEQ ID NO: 595)
WTnuc =
‘GCGGACATGGAGGACGTGCGCGGCCGCCTGGTGCAGTACCGCGGCGAGG
TGCAGGCCATGCTCGGCCAGA
GCACCGAGGAGCTGCGGGTGCGCCTCGCCTCCCACCTGCGCAAGCTGCGT
AAGCGGCTCCTCCGCGATGCCGATGAC
CTGCAGAAGCGCCTGGCAGTGTACCAGGCCGGGGCCCGCGAGGGCGCCGA
GCGCGGCCTCAGCGCCATCCGCGAGCG
CCTGGGGCCCCTGGTGGAACAG’;

```
  %cycle through fastq files for different samples files=dir(‘*.fastq’);
  for d=1:20
  filename=files(d).name;
  %read fastq file
  [header,seqs,qscore]=fastqread(filename);
```

| | |
|---|---|
| seqsLength=length(seqs); | % number of sequences seqsFile= |
| strrep(filename,‘.fastq’,”); | % trims off .fastq |

%create a directory with the same name as fastq file ifexist(seqsFile,‘dir’);

error(‘Directory already exists. Please rename or move it before moving on.’);

end

| | |
|---|---|
| mkdir(seqsFile); | % make directory |
| wtLength=length(WTnuc); | % length of wildtype sequence |

```
  %% aligning back to the wildtype nucleotide sequence
  %
  % AlN is a matrix of the nucleotide alignment window=1:wtLength;
```

| | |
|---|---|
| sBLength = length(seqs); | % number of sequences |

```
  % counts number of skips nSkips = 0;
  ALN=repmat(“,[sBLength wtLength]);
  % iterate through each sequencing read for i = 1:sBLength
  %If you only have forward read fastq files leave as is
  %If you have R1 foward and R2 is reverse fastq files uncomment the
  %next four lines of code and the subsequent end statement
```

| | |
|---|---|
| % | ifmod(d,2) == 0; |
| % | reverse=seqrcomplement(seqs{i}); |
| % | [score,alignment,start]= |

swalign(reverse,WTnuc,‘Alphabet’,‘NT’);

| | |
|---|---|
| % | else |

[score,alignment,start]=swalign(seqs{i},WTnuc,‘Alphabet’,‘NT’);

| | |
|---|---|
| % | end |

```
  % length of the sequencing read len=
  length(alignment(3,:));
  % if there is a gap in the alignment , skip = 1 and we will
  % throw away the entire read skip = 0;
  for j = 1:len
if (alignment(3,j) == ‘−’ || alignment(1,j) == ‘−’) skip = 1;
```

break;

```
  end
  %in addition if the qscore for any given base in the read is
```

%below 31 the nucleotide is turned into an N (fastq qscores that are not letters)

```
  ifisletter(qscore{i}(start(1)+j−1)) else
  alignment(1,j) =‘N’;
    end
  end
  if skip == 0 && len>10
  ALN(i,  start(2):(start(2)+length(alignment)−1))=alignment(1,:);
```

end

```
  end
  % with the alignment matrices we can simply tally up the occurrences of
  % each nucleotide at each column in the alignment these
  % tallies ignore bases annotated as N
  % due to low qscores
  TallyNTD=zeros(5,wtLength); fori=1:wtLength
  TallyNTD(:,i)=[sum(ALN(:,i)==‘A’),sum(ALN(:,i)==‘C’),sum(ALN(:,i)==‘G’),sum(A
  LN(:,i)==‘T’),sum(ALN(:,i)==‘N’)];
  end
  % we then save these tally matrices in the respective folder for
  % further processing
  save(strcat(seqsFile,‘/TallyNTD’),‘TallyNTD’); dlmwrite(strcat(seqsFile,‘/TallyNTD.txt’),TallyNTD,‘precision’,
  ‘%.3f’, ‘newline’, ‘pc’); end
```

### INDEL Detection Matlab Script

(SEQ ID NO: 595)
WTnuc =
‘GCGGACATGGAGGACGTGCGCGGCCGCCTGGTGCAGTACCGCGGCGAGG
TGCAGGCCATGCTCGGCCAGA
GCACCGAGGAGCTGCGGGTGCGCCTCGCCTCCCACCTGCGCAAGCTGCGT
AAGCGGCTCCTCCGCGATGCCGATGAC
CTGCAGAAGCGCCTGGCAGTGTACCAGGCCGGGGCCCGCGAGGGCGCCGA
GCGCGGCCTCAGCGCCATCCGCGAGCG
CCTGGGGCCCCTGGTGGAACAG’;

```
  %cycle through fastq files for different samples files=dir(‘*.fastq’);
  %specify start and width of indel window as well as length of each flank indelstart=154;
  width=30; flank=10;
  for d=1:3
  filename=files(d).name;
  %read fastq file
  [header,seqs,qscore]=fastqread(filename);
```

| | |
|---|---|
| seqsLength = length(seqs); | % number of sequences seqsFile |

```
  =strcat(strrep(filename,‘.fastq’,”),‘_INDELS’);
  %create a directory with the same name as fastq file+_INDELS ifexist(seqsFile,‘dir’);
        error(‘Directory already exists. Please rename or move it before moving on.’);
```

| | |
|---|---|
| end | |
| mkdir(seqsFile); | % make directory |
| wtLength = length(WTnuc); | % length of wildtype sequence sBLength = |
| length(seqs); | % number of sequences |

```
  % initialize counters and cell arrays
  nSkips = 0; notINDEL=0;
  ins={ };
  dels={ }; NumIns=0;
  NumDels=0;
  % iterate through each sequencing read for i = 1:sBLength
      %search for 10BP sequences that should flank both sides of the “INDEL WINDOW”
    windowstart=strfind(seqs{i}, WTnuc(indelstart-flank:indelstart));
          windowend=strfind(seqs{i},WTnuc(indelstart+width:indelstart+width+flank
  ));
  % if the flanks are found proceed
  iflength(windowstart)==1&&length(windowend)==1
  %if the sequence length matches the INDEL window length save as
  %not INDEL
if windowend-windowstart==width+flank notINDEL=notINDEL+1;
  %if the sequence is two or more bases longer than the INDEL
  %window length save as an Insertion
elseif windowend-windowstart>=width+flank+2 NumIns=NumIns+1;
  ins{NumIns}=seqs{i};
  %if the sequence is two or more bases shorter than the INDEL
  %window length save as a Deletion
elseif windowend-windowstart <= width+flank−2 NumDels=NumDels+1;
  dels{NumDels}=seqs{i};
  %keep track of skipped sequences that are either one base
  %shorter or longer than the INDEL window width else
  nSkips=nSkips+1;
  end
  %keep track of skipped sequences that do not possess matching flank
  %sequences else
  nSkips=nSkips+1;
        end
  end
    fid=fopen(strcat(seqsFile,‘/summary.txt’),‘wt’);
    fprintf(fid, ‘Skipped reads %i\n not INDEL %i\n Insertions %i\n Deletions
%i\n’, [nSkips, notINDEL, NumIns, NumDels]); fclose(fid);
    save(strcat(seqsFile,‘/nSkips’),‘nSkips’); save(strcat(seqsFile,‘/notINDEL’),‘notINDEL’);
    save(strcat(seqsFile,‘/NumIns’),‘NumIns’); save(strcat(seqsFile,‘/NumDels’),‘NumDels’);
    save(strcat(seqsFile,‘/dels’),‘dels’);
    C = dels;
    fid = fopen(strcat(seqsFile, ‘/dels.txt’), ‘wt’); fprintf(fid,‘“%s”\n’,C{:});
    fclose(fid);
    save(strcat(seqsFile, ‘/ins’), ‘ins’); C = ins;
    fid = fopen(strcat(seqsFile, ‘/ins.txt’), ‘wt’); fprintf(fid,‘“%s”\n’,C{:});
    fclose(fid);
    end
```

### Example 5: Cas9 Variant Sequences

[0349] The disclosure provides Cas9 variants, for example Cas9 proteins from one or more organisms, which may comprise one or more mutations (e.g., to generate dCas9 or Cas9 nickase). In some embodiments, one or more of the amino acid residues, identified below by an asterisk, of a Cas9 protein may be mutated. In some embodiments, the D10 and/or H840 residues of the amino acid sequence provided in SEQ ID NO: 10, or a corresponding mutation in any of the amino acid sequences provided in SEQ ID NOs: 11-260, are mutated. In some embodiments, the D10 residue of the amino acid sequence provided in SEQ ID NO: 10, or a corresponding mutation in any of the amino acid sequences provided in SEQ ID NOs: 11-260, is mutated to any amino acid residue, except for D. In some embodiments, the D10 residue of the amino acid sequence provided in SEQ ID NO: 10, or a corresponding mutation in any of the amino acid sequences provided in SEQ ID NOs: 11-260, is mutated to an A. In some embodiments, the H840 residue of the amino acid sequence provided in SEQ ID NO: 10, or a corresponding residue in any of the amino acid sequences provided in SEQ ID NOs: 11-260, is an H. In some embodiments, the H840 residue of the amino acid sequence provided in SEQ ID NO: 10, or a corresponding mutation in any of the amino acid sequences provided in SEQ ID NOs: 11-260, is mutated to any amino acid residue, except for H. In some embodiments, the H840 residue of the amino acid sequence provided in SEQ ID NO: 10, or a corresponding mutation in any of the amino acid sequences provided in SEQ ID NOs: 11-260, is mutated to an A. In some embodiments, the D10 residue of the amino acid sequence provided in SEQ ID NO: 10, or a corresponding residue in any of the amino acid sequences provided in SEQ ID NOs: 11-260, is a D.

[0350] A number of Cas9 sequences from various species were aligned to determine whether corresponding homologous amino acid residues of D10 and H840 of SEQ ID NO: 10 or SEQ ID NO: 11 can be identified in other Cas9 proteins, allowing the generation of Cas9 variants with corresponding mutations of the homologous amino acid residues. The alignment was carried out using the NCBI Constraint-based Multiple Alignment Tool (COBALT (accessible at st-va.ncbi.nlm.nih.gov/tools/cobalt), with the following parameters. Alignment parameters: Gap penalties −11, −1; End-Gap penalties −5, −1. CDD Parameters: Use RPS BLAST on; Blast E-value 0.003; Find Conserved columns and Recompute on. Query Clustering Parameters: Use query clusters on; Word Size 4; Max cluster distance 0.8; Alphabet Regular.

[0351] An exemplary alignment of four Cas9 sequences is provided below. The Cas9 sequences in the alignment are: Sequence 1 (S1): SEQ ID NO: 11|WP_010922251|gi 499224711|type II CRISPR RNA-guided endonuclease Cas9 [Streptococcus pyogenes]; Sequence 2 (S2): SEQ ID NO: 12|WP_039695303|gi 746743737|type II CRISPR RNA-guided endonuclease Cas9 [Streptococcus gallolyticus]; Sequence 3 (S3): SEQ ID NO: 13|WP_045635197|gi 782887988|type II CRISPR RNA-guided endonuclease Cas9 [Streptococcus mitis]; Sequence 4 (S4): SEQ ID NO: 14|5AXW_A|gi 924443546|Staphylococcus aureus Cas9. The HNH domain (bold and underlined) and the RuvC domain (boxed) are identified for each of the four sequences. Amino acid residues 10 and 840 in S1 and the homologous amino acids in the aligned sequences are identified with an asterisk following the respective amino acid residue.

| | | | |
|---|---|---|---|
| S1 | 1 | --MDKK-YSIGLD*IGTNSVGWAVITDEYKVPSKKFKVLGNTDRHSIKKNLI--GALLFDSG--ETAEATRLKRTARRRYT | 73 |
| S2 | 1 | --MTKKNYSIGLD*IGTNSVGWAVITDDYKVPAKKMKVLGNTDKKYIKKNLL--GALLFDSG--ETAEATRLKRTARRRYT | 74 |
| S3 | 1 | --M-KKGYSIGLD*IGTNSVGFAVITDDYKVPSKKMKVLGNTDKRFIKKNLI--GALLFDEG--TTAEARRLKRTARRRYT | 73 |
| S4 | 1 | GSHMKRNYILGLD*IGITSVGYGII--DYET-----------------RDVIDAGVRLFKEANVENNEGRRSKRGARRLKR | 61 |
| S1 | 74 | RRKNRICYLQEIFSNEMAKVDDSFFHRLEESFLVEEDKKHERHPIFGNIVDEVAYHEKYPTIYHLRKKLVDSTDKADLRL | 153 |
| S2 | 75 | RRKNRLRYLQEIFANEIAKVDESFFQRLDESFLTDDDKTFDSHPIFGNKAEEDAYHQKFPTIYHLRKHLADSSEKADLRL | 154 |
| S3 | 74 | RRKNRLRYLQEIFSEEMSKVDSSFFHRLDDSFLIPEDKRESKYPIFATLTEEKEYHKQFPTIYHLRKQLADSKEKTDLRL | 153 |
| S4 | 62 | RRRHRIQRVKKLL--------------FDYNLLTD--------------------HSELSGINPYEARVKGLSQKLSEEE | 107 |
| S1 | 154 | IYLALAHMIKFRGHFLIEGDLNPDNSDVDKLFIQLVQTYNQLFEENPINASGVDAKAILSARLSKSRRLENLIAQLPGEK | 233 |
| S2 | 155 | VYLALAHMIKFRGHFLIEGELNAENTDVQKIFADFVGVYNRTFDDSHLSEITVDVASILTEKISKSRRLENLIKYYPTEK | 234 |
| S3 | 154 | IYLALAHMIKYRGHFLYEEAFDIKNNDIQKIFNEFISIYDNTFEGSSLSGQNAQVEAIFTDKISKSAKRERVLKLFPDEK | 233 |
| S4 | 108 | FSAALLHLAKRRG----------------------VHNVNEVEEDT---------------------------------- | 131 |
| S1 | 234 | KNGLFGNLIALSLGLTPNFKSNFDLAEDAKLQLSKDTYDDDLDNLLAQIGDQYADLFLAAKNLSDAILLSDILRVNTEIT | 313 |
| S2 | 235 | KNTLFGNLIALALGLQPNFKTNFKLSEDAKLQFSKDTYEEDLEELLGKIGDDYADLFTSAKNLYDAILLSGILTVDDNST | 314 |
| S3 | 234 | STGLFSEFLKLIVGNQADFKKHFDLEDKAPLQFSKDTYDEDLENLLGQIGDDFTDLFVSAKKLYDAILLSGILTVTDPST | 313 |
| S4 | 132 | -----GNELS------------------TKEQISRN-------------------------------------------- | 144 |
| S1 | 314 | KAPLSASMIKRYDEHHQDLTLLKALVRQQLPEKYKEIFFDQSKNGYAGYIDGGASQEEFYKFIKPILEKM--DGTEELLV | 391 |
| S2 | 315 | KAPLSASMIKRYVEHHEDLEKLKEFIKANKSELYHDIFKDKNKNGYAGYIENGVKQDEFYKYLKNILSKIKIDGSDYFLD | 394 |
| S3 | 314 | KAPLSASMIERYENHONDLAALKQFIKNNLPEKYDEVFSDQSKDGYAGYIDGKTTQETFYKYIKNLLSKF--EGTDYFLD | 391 |
| S4 | 145 | ----SKALEEKYVAELQ-------------------------------------------------LERLKKDG------ | 165 |
| S1 | 392 | KLNREDLLRKQRTFDNGSIPHQIHLGELHAILRRQEDFYPFLKDNREKIEKILTFRIPYYVGPLARGNSRFAWMTRKSEE | 471 |
| S2 | 395 | KIEREDFLRKQRTFDNGSIPHQIHLQEMHAILRRQGDYYPFLKEKQDRIEKILTFRIPYYVGPLVRKDSRFAWAEYRSDE | 474 |
| S3 | 392 | KIEREDFLRKQRTFDNGSIPHQIHLQEMNAILRRQGEYYPFLKDNKEKIEKILTFRIPYYVGPLARGNRDFAWLTRNSDE | 471 |
| S4 | 166 | --EVRGSINRFKTSD--------YVKEAKQLLKVQKAYHOLDQSFIDTYIDLLETRRTYYEGP--GEGSPFGW------K | 227 |
| S1 | 472 | TITPWNFEEVVDKGASAQSFIERMTNFDKNLPNEKVLPKHSLLYEYFTVYNELTKVKYVTEGMRKPAFLSGEQKKAIVDL | 551 |
| S2 | 475 | KITPWNFDKVIDKEKSAEKFITRMTLNDLYLPEEKVLPKHSHVYETYAVYNELTKIKYVNEQGKE-SFFDSNMKQEIFDH | 553 |
| S3 | 472 | AIRPWNFEEIVDKASSAEDFINKMTNYDLYLPEEKVLPKHSLLYETFAVYNELTKVKFIAEGLRDYQFLDSGQKKQIVNQ | 551 |
| S4 | 228 | DIKEW---------------YEMLMGHCTYFPEELRSVKYAYNADLYNALNDLNNLVITRDENEK---LEYYEKFQIIEN | 289 |
| $1 | 552 | LFKTNRKVTVKQLKEDYFKKIECFDSVEISGVEDR---FNASLGTYHDLLKIIKDKDFLDNEENEDILEDIVLTLTLFED | 628 |
| S2 | 554 | VFKENRKVTKEKLLNYLNKEFPEYRIKDLIGLDKENKSFNASLGTYHDLKKIL-DKAFLDDKVNEEVIEDIIKTLTLFED | 632 |
| S3 | 552 | LFKENRKVTEKDIIHYLHN-VDGYDGIELKGIEKQ---FNASLSTYHDLLKIIKDKEFMDDAKNEAILENIVHTLTIFED | 627 |
| S4 | 290 | VFKQKKKPTLKQIAKEILVNEEDIKGYRVTSTGKPEF---TNLKVYHDIKDITARKEII---ENAELLDQIAKILTIYQS | 363 |
| S1 | 629 | REMIEERLKTYAHLFDDKVMKQLKR-RRYTGWGRLSRKLINGIRDKQSGKTILDFLKSDGFANRNFMQLIHDDSLTFKED | 707 |
| S2 | 633 | KDMIHERLQKYSDIFTANQLKKLER-RHYTGWGRLSYKLINGIRNKENNKTILDYLIDDGSANRNFMQLINDDTLPFKQI | 711 |
| S3 | 628 | REMIKQRLAQYDSLFDEKVIKALTR-RHYTGWGKLSAKLINGICDKQTGNTILDYLIDDGKINRNFMQLINDDGLSFKEI | 706 |
| S4 | 364 | SEDIQEELTNLNSELTQEEIEQISNLKGYTGTHNLSLKAINLILDE------LWHTNDNQIAIFNRLKLVP--------- | 428 |
| S1 | 708 | [chemical structure] | 781 |
| S2 | 712 | [chemical structure] | 784 |
| S3 | 707 | [chemical structure] | 779 |
| S4 | 429 | [chemical structure] | 505 |
| S1 | 782 | KRIEEGIKELGSQIL-------KEHPVENTOLONEKLYLYYLQNGRDMYVDOELDINRLSD----YDVDH*IVPOSFLKDD | 850 |
| $2 | 785 | KKLQNSLKELGSNILNEEKPSYIEDKVENSHLQNDQLFLYYIQNGKDMYTGDELDIDHLSD----YDIDH*TIPQAFIKDD | 860 |
| S3 | 780 | KRIEDSLKILASGL---DSNILKENPTDNNOLONDRLFLYYLONGKDMYTGEALDINOLSS----YDIDH*TIPOAFIKDD | 852 |
| S4 | 506 | ERIEEIIRTTGK---------------ENAKYLIEKIKLHDMOEGKCLYSLEAIPLEDLLNNPFNYEVDH*IIPRSVSFDN | 570 |
| S1 | 851 | [chemical structure] | 922 |
| S2 | 861 | [chemical structure] | 932 |
| S3 | 853 | [chemical structure] | 924 |
| $4 | 571 | [chemical structure] | 650 |
| S1 | 923 | [chemical structure] | 1002 |
| S2 | 933 | [chemical structure] | 1012 |
| S3 | 925 | [chemical structure] | 1004 |
| S4 | 651 | [chemical structure] | 712 |
| S1 | 1003 | [chemical structure] | 1077 |
| S2 | 1013 | [chemical structure] | 1083 |
| S3 | 1005 | [chemical structure] | 1081 |
| S4 | 713 | [chemical structure] | 764 |
| S1 | 1078 | [chemical structure] | 1149 |
| S2 | 1084 | [chemical structure] | 1158 |
| S3 | 1082 | [chemical structure] | 1156 |
| $4 | 765 | [chemical structure] | 835 |
| S1 | 1150 | EKGKSKKLKSVKELLGITIMERSSFEKNPI-DFLEAKG-----YKEVKKDLIIKLPKYSLFELENGRKRMLASAGELQKG | 1223 |
| S2 | 1159 | EKGKAKKLKTVKELVGISIMERSFFEENPV-EFLENKG-----YHNIREDKLIKLPKYSLFEFEGGRRRLLASASELQKG | 1232 |
| S3 | 1157 | EKGKAKKLKTVKTLVGITIMEKAAFEENPI-TFLENKG-----YHNVRKENILCLPKYSLFELENGRRRLLASAKELQKG | 1230 |
| S4 | 836 | DPQTYQKLK--------LIMEQYGDEKNPLYKYYEETGNYLTKYSKKDNGPVIKKIKYYGNKLNAHLDITDDYPNSRNKV | 907 |
| S1 | 1224 | NELALPSKYVNFLYLASHYEKLKGSPEDNEQKQLFVEQHKHYLDEIIEQISEFSKRVILADANLDKVLSAYNKH------ | 1297 |
| S2 | 1233 | NEMVLPGYLVELLYHAHRADNF-----NSTEYLNYVSEHKKEFEKVLSCVEDFANLYVDVEKNLSKIRAVADSM------ | 1301 |
| S3 | 1231 | NEIVLPVYLTTLLYHSKNVHKL-----DEPGHLEYIQKHRNEFKDLLNLVSEFSQKYVLADANLEKIKSLYADN------ | 1299 |
| S4 | 908 | VKLSLKPYRFD-VYLDNGVYKFV-----TVKNLDVIK--KENYYEVNSKAYEEAKKLKKISNQAEFIASFYNNDLIKING | 979 |
| S1 | 1298 | RDKPIREQAENIIHLFTLTNLGAPAAFKYFDTTIDRKRYTSTKEVLDATLIHQSIT--------GLYETRI----DLSQL | 1365 |
| S2 | 1302 | DNFSIEEISNSFINLLTLTALGAPADFNFLGEKIPRKRYTSTKECLNATLIHQSIT--------GLYETRI----DLSKL | 1369 |
| S3 | 1300 | EQADIEILANSFINLLTFTALGAPAAFKFFGKDIDRKRYTTVSEILNATLIHQSIT--------GLYETWI----DLSKL | 1367 |
| S4 | 980 | ELYRVIGVNNDLLNRIEVNMIDITYR-EYLENMNDKRPPRIIKTIASKT---QSIKKYSTDILGNLYEVKSKKHPQIIKK | 1055 |
| S1 | 1366 | GGD | 1368 |
| S2 | 1370 | GEE | 1372 |
| S3 | 1368 | GED | 1370 |
| S4 | 1056 | G-- | 1056 |

[0352] The alignment demonstrates that amino acid sequences and amino acid residues that are homologous to a reference Cas9 amino acid sequence or amino acid residue can be identified across Cas9 sequence variants, including, but not limited to Cas9 sequences from different species, by identifying the amino acid sequence or residue that aligns with the reference sequence or the reference residue using alignment programs and algorithms known in the art. This disclosure provides Cas9 variants in which one or more of the amino acid residues identified by an asterisk in SEQ ID NOs: 11-14 (e.g., S1, S2, S3, and S4, respectively) are mutated as described herein. The residues D10 and H840 in Cas9 of SEQ ID NO: 10 that correspond to the residues identified in SEQ ID NOs: 11-14 by an asterisk are referred to herein as “homologous” or “corresponding” residues. Such homologous residues can be identified by sequence alignment, e.g., as described above, and by identifying the sequence or residue that aligns with the reference sequence or residue. Similarly, mutations in Cas9 sequences that correspond to mutations identified in SEQ ID NO: 10 herein, e.g., mutations of residues 10, and 840 in SEQ ID NO: 10, are referred to herein as “homologous” or “corresponding” mutations. For example, the mutations corresponding to the D10A mutation in SEQ ID NO: 10 or S1 (SEQ ID NO: 11) for the four aligned sequences above are D11A for S2, D10A for S3, and D13A for S4; the corresponding mutations for H840A in SEQ ID NO: 10 or S1 (SEQ ID NO: 11) are H850A for S2, H842A for S3, and H560A for S4.

[0353] A total of 250 Cas9 sequences (SEQ ID NOs: 11-260) from different species were aligned using the same algorithm and alignment parameters outlined above. Amino acid residues homologous to residues 10, and 840 of SEQ ID NO: 10 were identified in the same manner as outlined above. The alignments are provided below. The HNH domain (bold and underlined) and the RuvC domain (boxed) are identified for each of the four sequences. Single residues corresponding to amino acid residues 10, and 840 in SEQ ID NO: 10 are boxed in SEQ ID NO: 11 in the alignments, allowing for the identification of the corresponding amino acid residues in the aligned sequences.

Lengthy table referenced here
US20250270527A1-20250828-T00001
Please refer to the end of the specification for access instructions.

### Example 6: Next Generation C to T Editors

[0354] Other families of cytidine deaminases as alternatives to base etitor 3 (BE3) constructs were examined. The different C to T editors were developed to have a narrow or different editing window, alternate sequence specificity to expand targetable substrates, and to have higher activity.

[0355] Using the methods described in Example 4, the pmCDA1 (cytidine deaminase 1 from Petromyzon marinus) activity at the HeK-3 site is evaluated (FIG. 42). The pmCDA1-nCas9-UGI-NLS (nCas9 indicates the Cas9 nickase described herein) construct is active on some sites (e.g., the C bases on the complementary strand at position 9, 5, 4, and 3) that are not accessible with rAPOBEC1 (BE3).

[0356] The pmCDA1 activity at the HeK-2 site is given in FIG. 43. The pmCDA1-XTEN-nCas9-UGI-NLS construct is active on sites adjacent to “G,” while rAPOBEC1 analog (BE3 construct) has low activity on “C”'s that are adjacent to “G”s, e.g., the C base at position 11 on the complementary strand.

[0357] The percent of total sequencing reads with target C converted to T (FIG. 44), C converted to A (FIG. 45), and C converted to G (FIG. 46) are shown for CDA and APOBEC1 (the BE3 construct).

[0358] The huAPOBEC3G activity at the HeK-2 site is shown in FIG. 47. Two constructs were used: huAPOBEC3G-XTEN-nCas9-UGI-NLS and huAPOBEC3G*(D316R_D317R)-XTEN-nCas9-UGI-NLS. The huAPOBEC3G-XTEN-nCas9-UGI-NLS construct has different sequence specificity than rAPOBEC1 (BE3), as shown in FIG. 47, the editing window appears narrow, as indicated by APOBEC3G's decreased activity at position 4 compared to APOBEC1. Mutations made in huAPOBEC3G (D316R and D317R) increased ssDNA binding and resulted in an observable effect on expanding the sites which were edited (compare APOBEC3G with APOBEC3G_RR in FIG. 47). Mutations were chosen based on APOBEC3G crystal structure, see: Holden et al., Crystal structure of the anti-viral APOBEC3G catalytic domain and functional implication. Nature. (2008); 121-4, the entire contents of which are incorporated herein by reference.

### Example 7: PmCDA1/huAPOBEC3G/rAPOBEC1 Work in E. coli

[0359] LacZ selection optimization for the A to I conversion was performed using a bacterial strain with lacZ encoded on the F plasmid. A critical glutamic acid residue was mutated (e.g., GAG to GGG, Glu to Gly mutation) so that G to A by a cytidine deaminase would restore lacZ activity (FIG. 48). Strain CC102 was selected for the selection assay. APOBEC1 and CDA constructs were used in a selection assay to optimize G to A conversion.

[0360] To evaluate the effect of copy number of the plasmids encoding the deaminase constructs on lacZ reversion frequency, the CDA and APOBEC1 deaminases were cloned into 4 plasmids with different replication origins (hence different copy numbers), SC101, CloDF3, RSF1030, and PUC (copy number: PUC>RSF1030>CloDF3>SC101) and placed under an inducible promoter. The plasmids were individually transformed into E. coli cells harboring F plasmid containing the mutated LacZ gene. The expression of the deaminases were induced and LacZ activity was detected for each construct (FIG. 49). As shown in FIG. 49, CDA exhibited significantly higher activity than APOBEC1 in all instances, regardless of the plasmid copy number the deaminases were cloned in. Further, In terms of the copy number, the deaminase activity was positively correlated with the copy number of the plasmid they are cloned in, i.e., PUC>CloDF3>SC101.

[0361] LacZ reversions were confirmed by sequencing of the genomic DNA at the lacZ locus. To obtain the genomic DNA containing the corrected LacZ gene, cells were grown media containing X-gal, where cells having LacZ activity form blue colonies. Blue colonies were selected and grown in minimal media containing lactose. The cells were spun down, washed, and re-plated on minimal media plates (lactose). The blue colony at the highest dilution was then selected, and its genomic DNA was sequenced at the lacZ locus (FIG. 50).

[0362] A chloramphenicol reversion assay was designed to test the activity of different cytidine deaminases (e.g., CDA, and APOBEC1). A plasmid harboring a mutant CAT1 gene which confers chloramphenicol resistance to bacteria is constructed with RSF1030 as the replication origin. The mutant CAT1 gene encodings a CAT1 protein that has a H195R (CAC to CGC) mutation, rendering the protein inactive (FIG. 51). Deamination of the C base-paired to the G base in the CGC codon would convert the codon back to a CAC codon, restoring the activity of the protein. As shown in FIG. 52, CDA outperforms rAPOBEC in E. coli in restoring the activity of the chloramphenicol resistance gene. The minimum inhibitory concentration (MIC) of chlor in S1030 with the selection plasmid (pNMG_ch_5) was approximately 1 μg/mL. Both rAPOBEC-XTEN-dCas9-UGI and CDA-XTEN-dCas9-UGI induced DNA correction on the selection plasmid (FIG. 53).

[0363] Next, the huAPOBEC3G-XTEN-dCas9-UGI protein was tested in the same assay. Interestingly, huAPOBEC3G-XTEN-dCas9-UGI exhibited different sequence specificity than the rAPOBEC1-XTEN-dCas9-UGI fusion protein. Only position 8 was edited with APOBEC3G-XTEN-dCas9-UGI fusion, as compared to the rAPOBEC11-XTEN-dCas9-UGIfusion (in which positions 3, 6, and 8 were edited) (FIG. 54).

### Example 8: C to T Base Editors with Less Off Target Editing

[0364] Current base editing technologies allow for the sequence-specific conversion of a C:G base pair into a T:A base pair in genomic DNA. This is done via the direct catalytic conversion of cytosine to uracil by a cytidine deaminase enzyme and thus, unlike traditional genome editing technologies, does not introduce double-stranded DNA breaks (DSBs) into the DNA as a first step. See, Komor, A. C., Kim, Y. B., Packer, M. S., Zuris, J. A., and Liu, D. R. (2016), “Programmable editing of a target base in genomic DNA without double-stranded DNA cleavage.” Nature 533, 420-424; the entire contents of which are incorporated by reference herein. Instead, catalytically dead SpCas9 (dCas9) or a SpCas9 nickase (dCas9(A840H)) is tethered to a cytidine deaminase enzyme such as rAPOBEC1, pmCDA1, or hAPOBEC3G. The genomic locus of interest is encoded by an sgRNA, and DNA binding and local denaturation is facilitated by the dCas9 portion of the fusion. However, just as wt dCas9 and wt Cas9 exhibit off-target DNA binding and cleavage, current base editors also exhibit C to T editing at Cas9 off-target loci, which limits their therapeutic usefulness.

[0365] It has been reported that the introduction of just three to four mutations into SpCas9 that neutralize nonspecific electrostatic interactions between the protein and the sugar-phosphate backbone of its target DNA, increases the DNA binding specificity of SpCas9. See, Kleinstiver, B. P., Pattanayak, V., Prew, M. S., Tsai, S. Q., Nguyen, N. T., Zheng, Z., and Joung, J. K. (2016) “High-fidelity CRISPR-Cas9 nucleases with no detectable genome-wide off-target effects.” Nature 529, 490-495; and Slaymaker, I. M., Gao, L., Zetsche, B., Scott, D. A., Yan, W. X., and Zhang, F. (2015) “Rationally engineered Cas9 nucleases with improved specificity. Science 351, 84-88; the entire contents of each are hereby incorporated by reference herein. Four reported neutralizing mutations were therefore incorporated into the initially reported base editor BE3 (SEQ ID NO: 285), and found that off-target C to T editing of this enzyme is also drastically reduced (FIG. 55), with no decrease in on-target editing (FIG. 56).

[0366] As shown in FIG. 55, HEK293T cells were transfected with plasmids expressing BE3 or HF-BE3 and a sgRNA matching the EMX1 sequence using Lipofectamine 2000. Three days after transfection, genomic DNA was extracted, amplified by PCR, and analyzed by high-throughput DNA sequencing at the on-target locus, plus the top ten known Cas9 off-target loci for the EMX1 sgRNA, as previously determined by Joung and coworkers using the GUIDE-seq method. See Tsai, S. Q., Zheng, Z., Nguyen, N. T., Liebers, M., Topkar, V. V., Thapar, V., Wyvekens, N., Khayter, C., Iafrate, A. J., Le, L. P., et al. (2015) “GUIDE-seq enables genome-wide profiling of off-target cleavage by CRISPR-Cas nucleases.” Nat Biotech 33, 187-197; the entire contents of which are incorporated by reference herein. EMX1 off-target 5 locus did not amplify and is not shown. Sequences of the on-target and off-target protospacers and protospacer adjacent motifs (PAMs) are displayed (FIG. 55). Cellular C to T conversion percentages, defined as the percentage of total DNA sequencing reads with T at each position of an original C within the protospacer, are shown for BE3 and HF-BE3.

[0367] In FIG. 56, HEK293T cells were transfected with plasmids expressing BE3 or HF-BE3 and sgRNAs matching the genomic loci indicated using Lipofectamine 2000. Three days after transfection, genomic DNA was extracted, amplified by PCR, and analyzed by high-throughput DNA sequencing at the on-target loci. The percentage of total DNA sequencing reads with all four bases at the target Cs within each protospacer are shown for treatment with BE3 or HF-BE3 (FIG. 56). Frequencies of indel formation are shown as well.

### Primary Protein Sequence of HF-BE3 (SEQ ID NO: 285):

MSSETGPVAVDPTLRRRIEPHEFEVFFDPRELRKETCLLYEINWGGRHSI
WRHTSQNTNKHVEVNFIEKFTTERYFCPNTRCSITWFLSWSPCGECSRAI
TEFLSRYPHVTLFIYIARLYHHADPRNRQGLRDLISSGVTIQIMTEQESG
YCWRNFVNYSPSNEAHWPRYPHLWVRLYVLELYCIILGLPPCLNILRRKQ
PQLTFFTIALQSCHYQRLPPHILWATGLKSGSETPGTSESATPESDKKYS
IGLAIGTNSVGWAVITDEYKVPSKKFKVLGNTDRHSIKKNLIGALLFDSG
ETAEATRLKRTARRRYTRRKNRICYLQEIFSNEMAKVDDSFFHRLEESFL
VEEDKKHERHPIFGNIVDEVAYHEKYPTIYHLRKKLVDSTDKADLRLIYL
ALAHMIKFRGHFLIEGDLNPDNSDVDKLFIQLVQTYNQLFEENPINASGV
DAKAILSARLSKSRRLENLIAQLPGEKKNGLFGNLIALSLGLTPNFKSNF
DLAEDAKLQLSKDTYDDDLDNLLAQIGDQYADLFLAAKNLSDAILLSDIL
RVNTEITKAPLSASMIKRYDEHHQDLTLLKALVRQQLPEKYKEIFFDQSK
NGYAGYIDGGASQEEFYKFIKPILEKMDGTEELLVKLNREDLLRKQRTFD
NGSIPHQIHLGELHAILRRQEDFYPFLKDNREKIEKILTFRIPYYVGPLA
RGNSRFAWMTRKSEETITPWNFEEVVDKGASAQSFIERMTAFDKNLPNEK
VLPKHSLLYEYFTVYNELTKVKYVTEGMRKPAFLSGEQKKAIVDLLFKTN
RKVTVKQLKEDYFKKIECFDSVEISGVEDRFNASLGTYHDLLKIIKDKDF
LDNEENEDILEDIVLTLTLFEDREMIEERLKTYAHLFDDKVMKQLKRRRY
TGWGALSRKLINGIRDKQSGKTILDFLKSDGFANRNFMALIHDDSLTFKE
DIQKAQVSGQGDSLHEHIANLAGSPAIKKGILQTVKVVDELVKVMGRHKP
ENIVIEMARENQTTQKGQKNSRERMKRIEEGIKELGSQILKEHPVENTQL
QNEKLYLYYLQNGRDMYVDQELDINRLSDYDVDHIVPQSFLKDDSIDNKV
LTRSDKNRGKSDNVPSEEVVKKMKNYWRQLLNAKLITQRKFDNLTKAERG
GLSELDKAGFIKRQLVETRAITKHVAQILDSRMNTKYDENDKLIREVKVI
TLKSKLVSDFRKDFQFYKVREINNYHHAHDAYLNAVVGTALIKKYPKLES
EFVYGDYKVYDVRKMIAKSEQEIGKATAKYFFYSNIMNFFKTEITLANGE
IRKRPLIETNGETGEIVWDKGRDFATVRKVLSMPQVNIVKKTEVQTGGFS
KESILPKRNSDKLIARKKDWDPKKYGGFDSPTVAYSVLVVAKVEKGKSKK
LKSVKELLGITIMERSSFEKNPIDFLEAKGYKEVKKDLIIKLPKYSLFEL
ENGRKRMLASAGELQKGNELALPSKYVNFLYLASHYEKLKGSPEDNEQKQ
LFVEQHKHYLDEIIEQISEFSKRVILADANLDKVLSAYNKHRDKPIREQA
ENIIHLFTLTNLGAPAAFKYFDTTIDRKRYTSTKEVLDATLIHQSITGLY
ETRIDLSQLGGDSGGSTNLSDIIEKETGKQLVIQESILMLPEEVEEVIGN
KPESDILVHTAYDESTDENVMLLTSDAPEYKPWALVIQDSNGENKIKMLS
GGSPKKKRKV

### Example 9: Development of Base Editors that Use Cas9 Variants and Modulation of the Base Editor Processivity to Increase the Target Range and Precision of the Base Editing Technology

[0368] Unlike traditional genome editing platforms, base editing technology allows precise single nucleotide changes in the DNA without inducing double-stranded breaks (DSBs). See, Komor, A. C. et al. Nature 533, 420-424 (2016). The current generation of base editor uses the NGG PAM exclusively. This limits its ability to edit desired bases within the genome, as the base editor needs to be placed at a precise location where the target base is placed within a 4-base region (the ‘deamination window’), approximately 15 bases upstream of the PAM. See, Komor, A. C. et al. Nature 533, 420-424 (2016). Moreover, due to the high processivity of cytidine deaminase, the base editor may convert all cytidines within its deamination window into thymidines, which could induce amino acid changes other than the one desired by the researcher. See, Komor, A. C. et al. Nature 533, 420-424 (2016).

Expanding the Scope of Base Editing Through the Development of Base Editors with Cas9 Variants

[0369] Cas9 homologs and other RNA-guided DNA binders that have different PAM specificities were incorporated into the base editor architecture. See, Kleinstiver, B. P. et al. Nature 523, 481-485 (2015); Kleinstiver, B. P. et al. Nature Biotechnology 33, 1293-1298 (2015); and Zetsche, B. et al. Cell 163, 759-771 (2015); the entire contents of each are incorporated by reference herein. Furthermore, innovations that have broadened the PAM specificities of various Cas9 proteins were also incorporated to expand the target reach of the base editor even more. See, Kleinstiver, B. P. et al. Nature 523, 481-485 (2015); and Kleinstiver, B. P. et al. Nature Biotechnology 33, 1293-1298 (2015). The current palette of base editors is summarized in Table 4.

TABLE 4
New base editors made from Cas9 Variants

| | | | Reference for Cas9 |
|---|---|---|---|
| Species | PAM | Base Editor Name | variant |
| S. pyogenes | . . . NGG | BE3 | Wild-type |
| | . . . NGA | VQR BE3 or EQR | Kleinstiver, B. P. et |
| | | BE3 | al. |
| | . . . NGCG | VRER BE3 | Kleinstiver, B. P. et |
| | | | al. |
| S. aureus | . . . NNGRRT | SaBE3 | Wild-type |
| | . . . NNNRRT | SaKKH BE3 | Kleinstiver, B. P. et |
| | | | al. |
| L. bacterium | TTTN . . . | dCpf1 BE2 | Zetsche, B. et al. |

Modulating Base Editor's Processivity Through Site-Directed Mutagenesis of rAPOBEC1

[0370] It was reasoned that the processivity of the base editor could be modulated by making point mutations in the deaminase enzyme. The incorporation of mutations that slightly reduce the catalytic activity of deaminase in which the base editor could still catalyze on average one round of cytidine deamination but was unlikely to access and catalyze another deamination within the relevant timescale were pursued. In effect, the resulting base editor would have a narrower deamination window.

[0371] rAPOBEC1 mutations probed in this work are listed in Table 5. Some of the mutations resulted in slight apparent impairment of rAPOBEC1 catalysis, which manifested as preferential editing of one cytidine over another when multiple cytidines are found within the deamination window. Combining some of these mutations had an additive effect, allowing the base editor to discriminate substrate cytidines with higher stringency. Some of the double mutants and the triple mutant allowed selective editing of one cytidine among multiple cytidines that are right next to one another (FIG. 57).

TABLE 5
rAPOBEC1 Point Mutations Investigated

| rAPOBEC1 mutation | Corresponding mutation in | |
|---|---|---|
| studied in this work | APOBEC3G | Reference |
| H121R/H122R | D315R/D316R | Holden, L. G. et al. |
| R126A | R320A | Chen, K-M. et al. |
| R126E | R320E | Chen, K-M. et al. |
| R118A | R313A | Chen, K-M. et al. |
| W90A | W285A | Chen, K-M. et al. |
| W90Y | W285Y | |
| R312E | R326E | |

### Base Editor PAM Expansion and Processivity Modulation

[0372] The next generation of base editors were designed to expand editable cytidines in the genome by using other RNA-guided DNA binders (FIG. 58). Using a NGG PAM only allows for a single target within the “window” whereas the use of multiple different PAMs allows for Cas9 to be positioned anywhere to effect selective deamination. A variety of new base editors have been created from Cas9 variants (FIG. 59 and Table 4). Different PAM sites (NGA, FIG. 60; NGCG, FIG. 61; NNGRRT, FIG. 62; and NNHRRT, FIG. 63) were explored. Selective deamination was successfully achieved through kinetic modulation of cytidine deaminase point mutagenesis (FIG. 65 and Table 5).

[0373] The effect of various mutations on the deamination window was then investigated in cell culture using spacers with multiple cytidines (FIGS. 66 and 67).

[0374] Further, the effect of various mutations on different genomic sites with limited numbers of cytidines was examined (FIGS. 68 to 71). It was found that approximately one cytidine will be edited within the deamination window in the spacer, while the rest of the cytidines will be left intact. Overall, the preference for editing is as follows: C₆>C₅>>C₇≈C₄.

### Base Editing Using Cpf1

[0375] Cpf1, a Cas9 homolog, can be obtained as AsCpf1, LbCpf1, or from any other species. Schematics of fusion constructs, including BE2 and BE3 equivalents, are shown in FIG. 73. The BE2 equivalent uses catalytically inactive Cpf2 enzyme (dCpf1) instead of Cas9, while the BE3 equivalent includes the Cpf1 mutant, which nicks the target strand. The bottom schematic depicts different fusion architectures to combine the two innovations illustrated above it (FIG. 73). The base editing results of HEK293T cell TTTN PAM sites using Cpf1 BE2 were examined with different spacers (FIGS. 64A to 64C). In some embodiments, Cpf1 may be used in place of a Cas9 domain in any of the base editors provided herein. In some embodiments, the Cpf1 is a protein that is at least 50%, 55%, 60%, 65%, 70%, 75%, 80%, 85%, 90%, 95%, 98%, 99%, or 99.5% identical to SEQ ID NO 313.

### Full Protein Sequence of Cpf1 (SEQ ID NO: 313):

MSIYQEFVNKYSLSKTLRFELIPQGKTLENIKARGLILDDEKRAKDYKKA
KQIIDKYHQFFIEEILSSVCISEDLLQNYSDVYFKLKKSDDDNLQKDFKS
AKDTIKKQISEYIKDSEKFKNLFNONLIDAKKGQESDLILWLKQSKDNGI
ELFKANSDITDIDEALEIIKSFKGWTTYFKGFHENRKNVYSSNDIPTSII
YRIVDDNLPKFLENKAKYESLKDKAPEAINYEQIKKDLAEELTFDIDYKT
SEVNQRVFSLDEVFEIANFNNYLNQSGITKENTIIGGKFVNGENTKRKGI
NEYINLYSQQINDKTLKKYKMSVLFKQILSDTESKSFVIDKLEDDSDVVT
TMQSFYEQIAAFKTVEEKSIKETLSLLFDDLKAQKLDLSKIYFKNDKSLT
DLSQQVEDDYSVIGTAVLEYITQQIAPKNLDNPSKKEQELIAKKTEKAKY
LSLETIKLALEEFNKHRDIDKQCRFEEILANFAAIPMIFDEIAQNKDNLA
QISIKYQNQGKKDLLQASAEDDVKAIKDLLDQTNNLLHKLKIFHISQSED
KANILDKDEHFYLVFEECYFELANIVPLYNKIRNYITQKPYSDEKFKLNF
ENSTLANGWDKNKEPDNTAILFIKDDKYYLGVMNKKNNKIFDDKAIKENK
GEGYKKIVYKLLPGANKMLPKVFFSAKSIKFYNPSEDILRIRNHSTHTKN
GSPQKGYEKFEFNIEDCRKFIDFYKQSISKHPEWKDFGFRFSDTQRYNSI
DEFYREVENQGYKLTFENISESYIDSVVNQGKLYLFQIYNKDFSAYSKGR
PNLHTLYWKALFDERNLQDVVYKLNGEAELFYRKQSIPKKITHPAKEAIA
NKNKDNPKKESVFEYDLIKDKRFTEDKFFFHCPITINFKSSGANKENDEI
NLLLKEKANDVHILSIDRGERHLAYYTLVDGKGNIIKQDTFNIIGNDRMK
TNYHDKLAAIEKDRDSARKDWKKINNIKEMKEGYLSQVVHEIAKLVIEYN
AIVVFEDLNFGFKRGRFKVEKQVYQKLEKMLIEKLNYLVFKDNEFDKTGG
VLRAYQLTAPFETFKKMGKQTGIIYYVPAGFTSKICPVTGFVNQLYPKYE
SVSKSQEFFSKFDKICYNLDKGYFEFSFDYKNFGDKAAKGKWTIASFGSR
LINFRNSDKNHNWDTREVYPTKELEKLLKDYSIEYGHGECIKAAICGESD
KKFFAKLTSVLNTILQMRNSKTGTELDYLISPVADVNGNFFDSRQAPKNM
PQDADANGAYHIGLKGLMLLGRIKNNQEGKKLNLVIKNEEYFEFVQNRNN

### Example 10: Increased Fidelity of Base Editing

[0376] Examining the difference between plasmid delivery of BE3 and HF-BE3, it was found that the two edit on-target loci with comparable efficiency (FIGS. 74 and 75). However, HF-BE3 edited off-target loci much less than BE3, meaning that HF-BE3 has a much higher DNA specificity than BE3 (FIG. 76). Deaminase protein lipofection to HEK cells demonstrated that protein delivery of BE3 results in comparable on-target activity, but much better specificity, than plasmid DNA delivery of BE3. Using improved transfection procedures and better plasmids (n=2), the experiment used the following conditions: protein delivery was 125 nM Cas9:sgRNA complex, plasmid delivery was 750 ng BE3/HF-BE3 plasmid +250 ng sgRNA plasmid, and lipofection was with 1.5 μL of Lipofectamine 2000 per well. EMX-1 off target site 2 and FANCF off-target site 1 showed the most off-target editing with BE3, compared to all of the off-targets assayed (FIGS. 77 and 78), while HEK-3 showed no significant editing at off-targets for any of the delivery methods (FIG. 79). HEK-4 shows some C-to-G editing on at the on-target site, while its off-target sites 1, 3, and 4 showed the most off-target editing of all the assayed sites (FIG. 80).

### Delivery of BE3 Protein Via Micro-Injection to Zebrafish

[0377] TYR guide RNAs were tested in an in vitro assay for sgRNA activity (FIGS. 81 and 82). The % HTS reads shows how many C residues were converted to T residues during a 2h incubation with purified BE3 protein and PCR of the resulting product. Experiments used an 80-mer synthetic DNA substrate with the target deamination site in 60bp of its genomic context. This is not the same as % edited DNA strands because only one strand was nicked, so the product is not amplified by PCR. The proportion of HTS reads edited is equal to x/(2−x), where x is the actual proportion of THS reads edited. For 60% editing, the actual proportion of bases edited is 75%. “Off target” is represents BE3 incubated with the same DNA substrate, while bound to an off-target sgRNA. It was found sgRNAs sgRH_13, sgHR_17, and possibly sgHR_16 appeared to be promising targets for in vivo injection experiments.

[0378] The delivery of BE3 protein in was tested in vivo in zebrafish. Zebrafish embryos (n=16-24) were injected with either scrambled sgRNA, sgHR_13, sgHR_16, or sgHR_17 and purified BE3. Three embryos from each condition were analyzed independently (single embryo) and for each condition, all of the injected embryos were pooled and sequenced as a pool. The results are shown in FIGS. 83 to 85.

### Example 11: Uses of Base Editors to Treat Disease

[0379] Base editors or complexes provided herein (e.g., BE3) may be used to modify nucleic acids. For example, base editors may be used to change a cytosine to a thymine in a nucleic acid (e.g., DNA). Such changes may be made to, inter alia, alter the amino acid sequence of a protein, to destroy or create a start codon, to create a stop codon, to disrupt splicing donors, to disrupt splicing acceptors or edit regulatory sequences. Examples of possible nucleotide changes are shown in FIG. 86.

[0380] Base editors or complexes provided herein (e.g., BE3) may be used to edit an isoform of Apolipoprotein E in a subject. For example, an Apolipoprotein E isoform may be edited to yield an isoform associated with a lower risk of developing Alzheimer's disease. Apolipoprotein E has four isoforms that differ at amino acids 112 and 158. APOE4 is the largest and most common genetic risk factor for late-onset Alzheimer's disease. Arginine residue 158 of APOE4, encoded by the nucleic acid sequence CGC, may be changed to a cysteine by using a base editor (e.g., BE3) to change the CGC nucleic acid sequence to TGC, which encodes cysteine at residue 158. This change yields an APOE3r isoform, which is associated with lower Alzheimer's disease risk. See FIG. 87.

[0381] It was tested whether base editor BE3 could be used to edit APOE4 to APOE3r in mouse astrocytes (FIG. 88). APOE 4 mouse astrocytes were nucleofected with Cas9+template or BE3, targeting the nucleic acid encoding Arginine 158 of APOE4. The Cas9+template yielded only 0.3% editing with 26% indels, while BE3 yielded 75% editing with 5% indels. Two additional base-edited cytosines are silent and do not yield changes to the amino acid sequence (FIG. 88).

[0382] Base editors or complexes provided herein may be used to treat prion protein diseases such as Creutzfeldt-Jakob disease and fatal familial insomnia, for example, by introducing mutations into a PRNP gene. Reverting PRNP mutations may not yield therapeutic results, and intels in PRNP may be pathogenic. Accordingly, it was tested whether PRNP could be mutated using base editors (e.g., BE3) to introduce a premature stop codon in the PRNP gene. BE3, associated with its guide RNA, was introduced into HEK cells or glioblastoma cells and was capable of editing the PRNP gene to change the encoded arginine at residue 37 to a stop codon. BE3 yielded 41% editing (FIG. 89).

[0383] Additional genes that may be edited include the following: APOE editing of Arg 112 and Arg 158 to treat increased Alzheimer's risk; APP editing of Ala 673 to decrease Alzheimer's risk; PRNP editing of Arg 37 to treat fatal familial insomnia and other prion protein diseases; DMD editing of the exons 23 and 51 splice sites to treat Duchenne muscular dystrophy; FTO editing of intron 1 to treat obesity risk; PDS editing of exon 8 to treat Pendred syndrome (genetic deafness); TMC1 editing of exon 8 to treat congenital hearing loss; CYBB editing of various patient-relevant mutations to treat chronic granulomatous disease. Additional diseases that may be treated using the base editors provided herein are shown in Table 6, below.

[0384] UGI also plays a key role. Knocking out UDG (which UGI inhibits) was shown to dramatically improve the cleanliness and efficiency of C to T base editing (FIG. 90).

[0385] Furthermore, base editors with nickase and without UGI were shown to produce a mixture of outcomes, with very high indel rates (FIG. 91).

### Example 12: Expanding the Targeting Scope of Base Editing

[0386] Base editing is a new approach to genome editing that uses a fusion protein containing a catalytically defective Streptococcus pyogenes Cas9, a cytidine deaminase, and an inhibitor of base excision repair to induce programmable, single-nucleotide C→T (or G→A) changes in DNA without generating double-strand DNA breaks, without requiring a donor DNA template, and without inducing an excess of stochastic insertions and deletions¹. The development of five new C→T (or G→A) base editors that use natural and engineered Cas9 variants with different protospacer-adjacent motif (PAM) specificities to expand the number of sites that can be targeted by base editing by 2.5-fold are described herein. Additionally, new base editors containing mutated cytidine deaminase domains that narrow the width of the apparent editing window from approximately 5 nucleotides to 1 or 2 nucleotides were engineered, enabling the discrimination of neighboring C nucleotides that would previously be edited with comparable efficiency. Together, these developments substantially increase the targeting scope of base editing.

[0387] CRISPR-Cas9 nucleases have been widely used to mediate targeted genome editing². In most genome editing applications, Cas9 forms a complex with a single guide RNA (sgRNA) and induces a double-stranded DNA break (DSB) at the target site specified by the sgRNA sequence. Cells primarily respond to this DSB through the non-homologous end-joining (NHEJ) repair pathway, which results in stochastic insertions or deletions (indels) that can cause frameshift mutations that disrupt the gene. In the presence of a donor DNA template with a high degree of homology to the sequences flanking the DSB, gene correction can be achieved through an alternative pathway known as homology directed repair (HDR).^{3,4} Unfortunately, under most non-perturbative conditions HDR is inefficient, dependent on cell state and cell type, and dominated by a larger frequency of indels.^{3,4} As most of the known genetic variations associated with human disease are point mutations⁵, methods that can more efficiently and cleanly make precise point mutations are needed.

[0388] Base editing, which enables targeted replacement of a C:G base pair with a T:A base pair in a programmable manner without inducing DSBs¹, has been recently described. Base editing uses a fusion protein between a catalytically inactivated (dCas9) or nickase form of Streptococcus pyogenes Cas9 (SpCas9), a cytidine deaminase such as APOBEC1, and an inhibitor of base excision repair such as uracil glycosylase inhibitor (UGI) to convert cytidines into uridines within a five-nucleotide window specified by the sgRNA.¹ The third-generation base editor, BE3, converts C:G base pairs to T:A base pairs, including disease-relevant point mutations, in a variety of cell lines with higher efficiency and lower indel frequency than what can be achieved using other genome editing methods¹. Subsequent studies have validated the deaminase-dCas9 fusion approach in a variety of settings^{6,7.}

[0389] Efficient editing by BE3 requires the presence of an NGG PAM that places the target C within a five-nucleotide window near the PAM-distal end of the protospacer (positions 4-8, counting the PAM as positions 21-23)¹. This PAM requirement substantially limits the number of sites in the human genome that can be efficiently targeted by BE3, as many sites of interest lack an NGG 13- to 17-nucleotides downstream of the target C. Moreover, the high activity and processivity of BE3 results in conversion of all Cs within the editing window to Ts, which can potentially introduce undesired changes to the target locus. Herein, new C:G to T:A base editors that address both of these limitations are described.

[0390] It was thought that any Cas9 homolog that binds DNA and forms an “R-loop” complex⁸ containing a single-stranded DNA bubble could in principle be converted into a base editor. These new base editors would expand the number of targetable loci by allowing non-NGG PAM sites to be edited. The Cas9 homolog from Staphylococcus aureus (SaCas9) is considerably smaller than SpCas9 (1053 vs. 1368 residues), can mediate efficient genome editing in mammalian cells, and requires an NNGRRT PAM⁹. SpCas9 was replaced with SaCas9 in BE3 to generate SaBE3 and transfected HEK293T cells with plasmids encoding SaBE3 and sgRNAs targeting six human genomic loci (FIGS. 92A and 92B). After 3 d, the genomic loci were subjected to high-throughput DNA sequencing (HTS) to quantify base editing efficiency. SaBE3 enabled C to T base editing of target Cs at a variety of genomic sites in human cells, with very high conversion efficiencies (approximately 50-75% of total DNA sequences converted from C to T, without enrichment for transfected cells) arising from targeting Cs at positions 6-11. The efficiency of SaBE3 on NNGRRT-containing target sites in general exceeded that of BE3 on NGG-containing target sites¹. Perhaps due to its higher average efficiency, SaBE3 can also result in detectable base editing at target Cs at positions outside of the canonical BE3 activity window (FIG. 92C). In comparison, BE3 showed significantly reduced editing under the same conditions (0-11%), in accordance with the known SpCas9 PAM preference (FIG. 106A)¹⁰. These data show that SaBE3 can facilitate very efficient base editing at sites not accessible to BE3.

[0391] The targeting range of base editors was further expanded by applying recently engineered Cas9 variants that expand or alter PAM specificities. Joung and coworkers recently reported three SpCas9 mutants that accept NGA (VQR-Cas9), NGAG (EQR-Cas9), or NGCG (VRER-Cas9) PAM sequences¹¹. In addition, Joung and coworkers engineered a SaCas9 variant containing three mutations (SaKKH-Cas9) that relax its PAM requirement to NNNRRT¹². The SpCas9 portion of BE3 was replaced with these four Cas9 variants to produce VQR-BE3, EQR-BE3, VRER-BE3, and SaKKH-BE3, which target NNNRRT, NGA, NGAG, and NGCG PAMs respectively. HEK293T cells were transfected with plasmids encoding these constructs and sgRNAs targeting six genomic loci for each new base editor, and measured C to T base conversions using HTS.

[0392] SaKKH-BE3 edited sites with NNNRRT PAMs with efficiencies up to 62% of treated, non-enriched cells (FIG. 92D). As expected, SaBE3 was unable to efficiently edit targets containing PAMs that were NNNHRRT (where H=A, C, or T) (FIG. 92D). VQR-BE3, EQR-BE3, and VRER-BE3 exhibited more modest, but still substantial base editing efficiencies of up to 50% of treated, non-enriched cells at genomic loci with the expected PAM requirements with an editing window similar to that of BE3 (FIGS. 92E and 92F). Base editing efficiencies of VQR-BE3, EQR-BE3, and VRER-BE3 in general closely paralleled the reported PAM requirements of the corresponding Cas9 nucleases; for example, EQR-BE3 was unable to efficiently edit targets containing NGAH PAM sequences (FIG. 92F). In contrast, BE3 was unable to edit sites with NGA or NGCG PAMs efficiently (0-3%), likely due to its PAM restrictions (FIG. 106B).

[0393] Collectively, the properties of SaBE3, SaKKH-BE3, VQR-BE3, EQR-BE3, and VRER-BE3 establish that base editors exhibit a modularity that facilitates their ability to exploit Cas9 homologs and engineered variants.

[0394] Next, base editors with altered activity window widths were developed. All Cs within the activity window of BE3 can be efficiently converted to Ts¹. The ability to modulate the width of this window would be useful in cases in which it is important to edit only a subset of Cs present in the BE3 activity window.

[0395] The length of the linker between APOBEC1 and dCas9 was previously observed to modulate the number of bases that are accessible by APOBEC1 in vitro¹. In HEK293T cells, however, varying the linker length did not significantly modulate the width of the editing window, suggesting that in the complex cellular milieu, the relative orientation and flexibility of dCas9 and the cytidine deaminase are not strongly determined by linker length (FIG. 96). Next, it was thought that truncating the 5′ end of the sgRNA might narrow the base editing window by reducing the length of single-stranded DNA accessible to the deaminase upon formation of the RNA-DNA heteroduplex. HEK293T cells were co-transfected with plasmids encoding BE3 and sgRNAs of different spacer lengths targeting a locus with multiple Cs in the editing window. No consistent changes in the width of base editing when using truncated sgRNAs with 17- to 19-base spacers were observed (FIGS. 95A to 95B). Truncating the sgRNA spacer to fewer than 17 bases resulted in large losses in activity (FIG. 95A).

[0396] As an alternative approach, it was thought that mutations to the deaminase domain might narrow the width of the editing window through multiple possible mechanisms. First, some mutations may alter substrate binding, the conformation of bound DNA, or substrate accessibility to the active site in ways that reduce tolerance for non-optimal presentation of a C to the deaminase active site. Second, because the high activity of APOBEC1 likely contributes to the deamination of multiple Cs per DNA binding event,^{1,13,14} mutations that reduce the catalytic efficiency of the deaminase domain of a base editor might prevent it from catalyzing successive rounds of deamination before dissociating from the DNA. Once any C:G to T:A editing event has taken place, the sgRNA no longer perfectly matches the target DNA sequence and re-binding of the base editor to the target locus should be less favorable. Both strategies were tested in an effort to discover new base editors that distinguish among multiple cytidines within the original editing window.

[0397] Given the absence of an available APOBEC1 structure, several mutations previously reported to modulate the catalytic activity of APOBEC3G, a cytidine deaminase from the same family that shares 42% sequence similarity of its active site-containing domain to that of APOBEC1, were identified¹⁵. Corresponding APOBEC1 mutations were incorporated into BE3 and evaluated their effect on base editing efficiency and editing window width in HEK293T cells at two C-rich genomic sites containing Cs at positions 3, 4, 5, 6, 8, 9, 10, 12, 13, and 14 (site A); or containing Cs at positions 5, 6, 7, 8, 9, 10, 11, and 13 (site B).

[0398] The APOBEC1 mutations R118A and W90A each led to dramatic loss of base editing efficiency (FIG. 97C). R132E led to a general decrease in editing efficiency but did not change the substantially narrow the shape of the editing window (FIG. 97C). In contrast, several mutations that narrowed the width of the editing window while maintaining substantial editing efficiency were found (FIGS. 93A and 97C). The “editing window width” was defined to represent the artificially calculated window width within which editing efficiency exceeds the half-maximal value for that target. The editing window width of BE3 for the two C-rich genomic sites tested was 5.0 (site A) and 6.1 (site B) nucleotides.

[0399] R126 in APOBEC1 is predicted to interact with the phosphate backbone of ssDNA¹³. Previous studies have shown that introducing the corresponding mutation into APOBEC3G decreased catalysis by at least 5-fold¹⁴. Interestingly, when introduced into APOBEC1 in BE3, R126A and R126E increased or maintained activity relative to BE3 at the most strongly edited positions (C5, C6, and C7), while decreasing editing activity at other positions (FIGS. 93A and 97C). Each of these two mutations therefore narrowed the width of the editing window at site A and site B to 4.4 and 3.4 nucleotides (R126A), or to 4.2 and 3.1 nucleotides (R126E), respectively (FIGS. 93A and 97C).

[0400] W90 in APOBEC1 (corresponding to W285 in APOBEC3G) is predicted to form a hydrophobic pocket in the APOBEC3G active site and assist in substrate binding¹³. Mutating this residue to Ala abrogated APOBEC3G's catalytic activity¹³. In BE3, W90A almost completely abrogated base editing efficiency (FIG. 97C). In contrast, it was found that W90Y only modestly decreased base editing activity while narrowing the editing window width at site A and site B to 3.8 and 4.9 nucleotides, respectively (FIG. 93A). These results demonstrate that mutations to the cytidine deaminase domain can narrow the activity window width of the corresponding base editors.

[0401] W90Y, R126E, and R132E, the three mutations that narrowed the editing window without drastically reducing base editing activity, were combined into doubly and triply mutated base editors. The double mutant W90Y+R126E resulted in a base editor (YE1-BE3) with BE3-like maximal editing efficiencies, but substantially narrowed editing window width (width at site A and site B=2.9 and 3.0 nucleotides, respectively (FIG. 93A). The W90Y+R132E base editor (YE2-BE3) exhibited modestly lower editing efficiencies (averaging 1.4-fold lower maximal editing yields across the five sites tested compared with BE3), and also substantially narrowed editing window width (width at site A and site B=2.7 and 2.8 nucleotides, respectively) (FIG. 97C). The R126E+R132E double mutant (EE-BE3) showed similar maximal editing efficiencies and editing window width as YE2-BE3 (FIG. 97C). The triple mutant W90Y+R126E+R132E (YEE-BE3) exhibited 2.0-fold lower average maximal editing yields but very little editing beyond the C6 position and an editing window width of 2.1 and 1.4 nucleotides for site A and site B, respectively (FIG. 97C). These data taken together indicate that mutations in the cytidine deaminase domain can strongly affect editing window widths, in some cases with minimal or only modest effects on editing efficiency.

[0402] The base editing outcomes of BE3, YE1-BE3, YE2-BE3, EE-BE3, and YEE-BE3 were further compared in HEK293T cells targeting four well-studied human genomic sites that contain multiple Cs within the BE3 activity window¹. These target loci contained target Cs at positions 4 and 5 (HEK site 3), positions 4 and 6 (HEK site 2), positions 5 and 6 (EMX1), or positions 6, 7, 8, and 11 (FANCF). BE3 exhibited little (<1.2-fold) preference for editing any Cs within the position 4-8 activity window. In contrast, YE1-BE3, exhibited a 1.3-fold preference for editing C5 over C4 (HEK site 3), 2.6-fold preference for C6 over C4 (HEK site 2), 2.0-fold preference for C5 over C6 (EMX1), and 1.5-fold preference for C6 over C7 (FANCF) (FIG. 93B). YE2-BE3 and EE-BE3 exhibited somewhat greater positional specificity (narrower activity window) than YE1-BE3, averaging 2.4-fold preference for editing C5 over C4 (HEK site 3), 9.5-fold preference for C6 over C4 (HEK site 2), 2.9-fold preference for C5 over C6 (EMX1), and 2.6-fold preference for C7 over C6 (FANCF) (FIG. 93B). YEE-BE3 showed the greatest positional selectivity, with a 2.9-fold preference for editing C5 over C4 (HEK site 3), 29.7-fold preference for C6 over C4 (HEK site 2), 7.9-fold preference for C5 over C6 (EMX1), and 7.9-fold preference for C7 over C6 (FANCF) (FIG. 93B). The findings establish that mutant base editors can discriminate between adjacent Cs, even when both nucleotides are within the BE3 editing window.

[0403] The product distributions of these four mutants and BE3 were further analyzed by HTS to evaluate their apparent processivity. BE3 generated predominantly T4-T5 (HEK site 3), T4-T6 (HEK site 2), and T5-T6 (EMX1) products in treated HEK293T cells, resulting in, on average, 7.4-fold more products containing two Ts, than products containing a single T. In contrast, YE1-BE3, YE2-BE3, EE-BE3, and YEE-BE3 showed substantially higher preferences for singly edited C4-T5, C4-T6, and T5-C6 products (FIG. 93C). YE1-BE3 yielded products with an average single-T to double-T product ratio of 1.4. YE2-BE3 and EE-BE3 yielded products with an average single-T to double-T product ratio of 4.3 and 5.1, respectively (FIG. 93C). Consistent with the above results, the YEE-BE3 triple mutant favored single-T products by an average of 14.3-fold across the three genomic loci. (FIG. 93C). For the target site in which only one C is within the target window (HEK site 4, at position C5), all four mutants exhibited comparable editing efficiencies as BE3 (FIG. 98). These findings indicate that these BE3 mutants have decreased apparent processivity and can favor the conversion of only a single C at target sites containing multiple Cs within the BE3 editing window. These data also suggest a positional preference of C5>C6>C7≈C4 for these mutant base editors, although this preference could differ depending on the target sequence.

[0404] The window-modulating mutations in APOBEC1 were applied to VQR-BE3, allowing selective base editing of substrates at sites targeted by NGA PAM (FIG. 107A). However, when these mutations were applied to SaKKH-BE3, a linear decrease in base editing efficiency was observed without the improvement in substrate selectivity, suggesting a different kinetic equilibrium and substrate accessibility of this base editor than those of BE3 and its variants (FIG. 107B).

[0405] The five base editors with altered PAM specificities described in this study together increase the number of disease-associated mutations in the ClinVar database that can in principle be corrected by base editing by 2.5-fold (FIGS. 94A and 94B). Similarly, the development of base editors with narrowed editing windows approximately doubles the fraction of ClinVar entries with a properly positioned NGG PAM that can be corrected by base editing without comparable modification of a non-target C (from 31% for BE3 to 59% for YEE-BE3) (FIGS. 94A and 94B).

[0406] In summary, the targeting scope of base editing was substantially expanded by developing base editors that use Cas9 variants with different PAM specificities, and by developing a collection of deaminase mutants with varying editing window widths. In theory, base editing should be possible using other programmable DNA-binding proteins (such as Cpf1¹⁶) that create a bubble of single-stranded DNA that can serve as a substrate for a single-strand-specific nucleotide deaminase enzyme.

### Materials and Methods

[0407] Cloning. PCR was performed using Q5 Hot Start High-Fidelity DNA Polymerase (New England Biolabs). Plasmids for BE and sgRNA were constructed using USER cloning (New England Biolabs), obtained from previously reported plasmids¹. DNA vector amplification was carried out using NEB 10beta competent cells (New England Biolabs).

[0408] Cell culture. HEK293T (ATCC CRL-3216) were cultured in Dulbecco's Modified Eagle's Medium plus GlutaMax (ThermoFisher) supplemented with 10% (v/v) fetal bovine serum (FBS), at 37° C. with 5% CO₂. Immortalized rat astrocytes containing the ApoE4 isoform of the APOE gene (Taconic Biosciences) were maintained in Dulbecco's Modified Eagle's Medium plus GlutaMax (ThermoFisher Scientific) supplemented with 10% (v/v) fetal bovine serum (FBS) and 200 μg/mL Geneticin (ThermoFisher Scientific).

[0409] Transfections. HEK293T cells were seeded on 48-well collagen-coated BioCoat plates (Corning) and transfected at approximately 85% confluency. 750 ng of BE and 250 ng of sgRNA expression plasmids were transfected using 1.5 μl of Lipofectamine 2000 (ThermoFisher Scientific) per well according to the manufacturer's protocol.

[0410] High-throughput DNA sequencing of genomic DNA samples. Transfected cells were harvested after 3 d and the genomic DNA was isolated using the Agencourt DNAdvance Genomic DNA Isolation Kit (Beckman Coulter) according to the manufacturer's instructions. Genomic regions of interest were amplified by PCR with flanking HTS primer pairs listed in the Supplementary Sequences. PCR amplification was carried out with Phusion hot-start II DNA polymerase (ThermoFisher) according to the manufacturer's instructions. PCR products were purified using RapidTips (Diffinity Genomics). Secondary PCR was performed to attach sequencing adaptors. The products were gel-purified and quantified using the KAPA Library Quantification Kit-Illumina (KAPA Biosystems). Samples were sequenced on an Illumina MiSeq as previously described¹.

[0411] Data analysis. Nucleotide frequencies were assessed using a previously described MATLAB script 1. Briefly, the reads were aligned to the reference sequence via the Smith-Waterman algorithm. Base calls with Q-scores below 30 were replaced with a placeholder nucleotide (N). This quality threshold results in nucleotide frequencies with an expected theoretical error rate of 1 in 1000.

[0412] Analyses of base editing processivity were performed using a custom python script. This program trims sequencing reads to the 20 nucleotide protospacer sequence as determined by a perfect match for the 7 nucleotide sequences that should flank the target site. These targets were then consolidated and sorted by abundance to assess the frequency of base editing products.

[0413] Bioinformatic analysis of the ClinVar database of human disease-associated mutations was performed in a manner similar to that previously described but with small adjustments¹. These adjustments enable the identification of targets with PAMs of customizable length and sequence. In addition, this improved script includes a priority ranking of target C positions (C5>C6>C7>C8≈C4), thus enabling the identification of target sites in which the on-target C is either the only cytosine within the window or is placed at a position with higher predicted editing efficiency than any off-target C within the editing window.

### REFERENCES FOR EXAMPLE 12

[0414] 1 Komor, A. C. et al. Programmable editing of a target base in genomic DNA without double-stranded DNA cleavage. Nature 533, 420-424 (2016).
[0415] 2 Sander, J. D. & Joung, J. K. CRISPR-Cas systems for editing, regulating and targeting genomes. Nature biotechnology 32, 347-355 (2014).
[0416] 3 Cong, L. et al. Multiplex genome engineering using CRISPR/Cas systems. Science 339, 819-823 (2013).
[0417] 4 Ran, F. A. et al. Genome engineering using the CRISPR-Cas9 system. Nat. Protocols 8, 2281-2308 (2013).
[0418] 5 Landrum, M. J. et al. ClinVar: public archive of interpretations of clinically relevant variants. Nucleic Acids Res. 44, D862-D868 (2015).
[0419] 6 Nishida, K. et al. Targeted nucleotide editing using hybrid prokaryotic and vertebrate adaptive immune systems. Science 353, aaf8729-1-8 (2016).
[0420] 7 Ma, Y. et al. Targeted AID-mediated mutagenesis (TAM) enables efficient genomic diversification in mammalian cells. Nat. Methods doi:10.1038/nmeth.4027 (2016).
[0421] 8 Jiang, F. et al. Structures of a CRISPR-Cas9 R-loop complex primed for DNA cleavage. Science 351, 867-71 (2016).
[0422] 9 Ran, F. A. et al. In vivo genome editing using Staphylococcus aureus Cas9. Nature 520, 186-191 (2015).
[0423] 10 Zhang, Y. et al. Comparison of non-canonical PAMs for CRISPR/Cas9-mediated DNA cleavage in human cells. Sci. Rep. 4, (2014).
[0424] 11 Kleinstiver, B. P. et. al. Engineered CRISPR-Cas9 nucleases with altered PAM specificities. Nature 523, 481-485 (2015).
[0425] 12 Kleinstiver, B. P. et. al. Broadening the targeting range of Staphylococcus aureus CRISPR-Cas9 by modifying PAM recognition. Nat. Biotechnol. 33, 1293-1298 (2015).
[0426] 13 Holden, L. G. et al. Crystal structure of the anti-viral APOBEC3G catalytic domain and functional implications. Nature 452, 121-124 (2008).
[0427] 14 Chen, K.-M. et al. Structure of the DNA deaminase domain of the HIV-1 restriction factor APOBEC3G. Nature 452, 116-119 (2008).
[0428] 15 Harris, R. S., Petersen-Mahrt, S. K. & Neuberger, M. S. RNA Editing Enzyme APOBEC1 and Some of Its Homologs Can Act as DNA Mutators. Molecular Cell 10, 1247-1253 (2002).
[0429] 16 Zetsche, B. et al. Cpf1 Is a Single RNA-Guided Endonuclease of a Class 2 CRISPR-Cas System. Cell 163, 759-771 (2015).

### Example 13

[0430] Using improved transfection procedures and better plasmids, biological replicates (n=3) were used to install the four HF mutations into the Cas9 portion of BE3. The mutations do not significantly effect on-targeting editing with plasmid delivery (FIG. 99). At the tested concentration, BE3 protein delivery works; however, the on-target editing is lower than for plasmid delivery (FIG. 100). Protein delivery of BE3 with the HF mutations installed reduces on-targeting editing efficiency but still yields some edited cells (FIG. 101).

[0431] Both lipofection and installing HF mutations were shown to decrease off-target deamination events. For the four sites shown in FIG. 102, the off-target sitest (OT) with the highest GUIDE-Seq reads and deamination events were assayed (Komor et al., Nature, 2016). The specificity ratio was calculated by dividing the off-target editing by the on-target editing at the closest corresponding C. In cases where off-target editing was not detectable, the ratio was set to 100. Thus, a higher specificity ratio indicates a more specific construct. BE3 plasmid delivery showed much higher off-target/on-target editing than protein delivery of BE3, plasmid delivery of HF-BE3, or protein delivery of HF-BE3 (FIGS. 102 and 105).

[0432] Purified proteins HF-BE3 and BE3 were analyzed in vitro for their capabilities to convert C to T residues at different positions in the spacer with the most permissive motif. Both BE3 and HF-BE3 proteins were found to have the same “window” for base editing (FIGS. 103 and 104).

[0433] A list of the disease targets is given in Table 9. The base to be edited in Table 9 is indicated in bold and underlined.

TABLE 9
Base Editor Disease Targets

| GENE | DISEASE | SPACER | PAM | EDITOR | DEFECT | CELL |
|---|---|---|---|---|---|---|
| RB1 | RETINOBLA | AATCTAGTAAA | AAAA | SAKKH- | SPLICING | J82 |
| | STOMA | TAAATTGATGT | GT | BE3 | IMPAIR- | |
| | | | | | MENT | |
| PTEN | CANCER | GACCAACGGCT | TGA | VQR- | W111R | MC11 |
| | | AAGTGAAGA | | BE3 | | 6 |
| PIK3C | CANCER | TCCTTTCTTCA | ACTG | SAKKH- | K111R | CRL- |
| A | | CGGTTGCCT | GT | BE3 | | 5853 |
| PIK3C | CANCER | CTCCTGCTCAG | AGA | VQR- | Q546R | CRL- |
| A | | TGATTTCAG | | BE3 | | 2505 |
| TP53 | CANCER | TGTCACACATG | TGG | YEE- | N239D | SNU47 |
| | | TAGTTGTAG | | BE3 | | 5 |
| HRAS | CANCER | CCTCCCGGCCG | AGG | YEE- | Q61R | MC/C |
| | | GCGGTATCC | | BE3 | | AR |

TABLE 6
Exemplary diseases that may be treated using
base editors. The protospacer and PAM
sequences are shown in the sgRNA (PAM) column.
The PAM sequence is shown in parentheses and
with the base to be edited indicated by
underlining.

| Disease | gene | Base | sgRNA | Base |
|---|---|---|---|---|
| target | symbol | changed | (PAM) | editor |
| Prion | PRNP | R37* | GGCAGCCGAT | BE3 |
| disease | | | ACCCGGGGCA | |
| | | | (GGG) | |
| | | | GGGCAGCCGA | |
| | | | TACCCGGGGC | |
| | | | (AGG) | |
| Pendred | Slc26a4 | c.919-2A>G | TTATTGTCCG | BE3 |
| syndrome | | | AAATAAAAGA | |
| | | | (AGA) | |
| | | | ATTGTCCGAA | (VQR |
| | | | ATAAAAGAAG | SaCas9) |
| | | | (AGG) | |
| | | | TTGTCCGAAA | |
| | | | TAAAAGAAGA | |
| | | | (GGA) | |
| | | | GTCCGAAATA | |
| | | | AAAGAAGAGG | |
| | | | AAAA(AAT) | |
| | | | GTCCGAAATA | |
| | | | AAAGAAGAGG | |
| | | | AAAAA(ATT) | |
| Congenital | Tmc1 | c.545A>G | CAGGAAGCAC | BE3 |
| deafness | | | GAGGCCACTG | |
| | | | (AGG) | |
| | | | AACAGGAAGC | YE-BE3 |
| | | | ACGAGGCCAC | |
| | | | (TGA) | |
| | | | AGGAAGCACG | YEE-BE3 |
| | | | AGGCCACTGA | |
| | | | (GGA) | |
| Acquired | SNHL | S33F | TTGGATTCTG | BE3 |
| deafness | | | GAATCCATTC | |
| | | | (TGG) | |
| Alzheimer's | APP | A673T | TCTGCATCCA | BE3 VQR |
| Disease | | | TCTTCACTTC | |
| | | | (AGA) | |
| Niemann- | NPC1 | I1061T | CTTACAGCCA | BE3 VQR |
| Pick | | | GTAATGTCAC | |
| Disease | | | (CGA) | |
| Type C | | | | |

[0434] Additional exemplary genes in the human genome that may be targeted by the base editors or complexes of this disclosure are provided herein in Tables 7 and 8. Table 7 includes gene mutations that may be corrected by changing a cytosine (C) to a thymine (T), for example, using a BE3 nucleobase editor. Table 8 includes gene mutations that may be corrected by changing a guanine (G) to an adenine (A), for example, using a BE3 nucleobase

Lengthy table referenced here
US20250270527A1-20250828-T00002
Please refer to the end of the specification for access instructions.

### REFERENCES

[0435] 1. Humbert O, Davis L, Maizels N. Targeted gene therapies: tools, applications, optimization. Crit Rev Biochem Mol. 2012; 47(3):264-81. PMID: 22530743.
[0436] 2. Perez-Pinera P, Ousterout D G, Gersbach C A. Advances in targeted genome editing. Curr Opin Chem Biol. 2012; 16(3-4):268-77. PMID: 22819644.
[0437] 3. Urnov F D, Rebar E J, Holmes M C, Zhang H S, Gregory P D. Genome editing with engineered zinc finger nucleases. Nat Rev Genet. 2010; 11(9):636-46. PMID: 20717154.
[0438] 4. Joung J K, Sander J D. TALENs: a widely applicable technology for targeted genome editing. Nat Rev Mol Cell Biol. 2013; 14(1):49-55. PMID: 23169466.
[0439] 5. Charpentier E, Doudna J A. Biotechnology: Rewriting a genome. Nature. 2013; 495, (7439):50-1. PMID: 23467164.
[0440] 6. Pan Y, Xia L, Li A S, Zhang X, Sirois P, Zhang J, Li K. Biological and biomedical applications of engineered nucleases. Mol Biotechnol. 2013; 55(1):54-62. PMID: 23089945.
[0441] 7. De Souza, N. Primer: genome editing with engineered nucleases. Nat Methods. 2012; 9(1):27. PMID: 22312638.
[0442] 8. Santiago Y, Chan E, Liu P Q, Orlando S, Zhang L, Urnov F D, Holmes M C, Guschin D, Waite A, Miller J C, Rebar E J, Gregory P D, Klug A, Collingwood T N. Targeted gene knockout in mammalian cells by using engineered zinc-finger nucleases. Proc Natl Acad Sci USA. 2008; 105(15):5809-14. PMID: 18359850.
[0443] 9. Cargill M, Altshuler D, Ireland J, Sklar P, Ardlie K, Patil N, Lane C R, Lim E P, Kalyanaraman N, Nemesh J, Ziaugra L, Friedland L, Rolfe A, Warrington J, Lipshutz R, Daley G Q, Lander E S. Characterization of single-nucleotide polymorphisms in coding regions of human genes. Nat Genet. 1999; 22(3):231-8. PMID: 10391209.
[0444] 10. Jansen R, van Embden J D, Gaastra W, Schouls L M. Identification of genes that are associated with DNA repeats in prokaryotes. Mol Microbiol. 2002; 43(6):1565-75. PMID: 11952905.
[0445] 11. Mali P, Esvelt K M, Church G M. Cas9 as a versatile tool for engineering biology. Nat Methods. 2013; 10(10):957-63. PMID: 24076990.
[0446] 12. Jore M M, Lundgren M, van Duijin E, Bultema J B, Westra E R, Waghmare S P, Wiedenheft B, Pul U, Wurm R, Wagner R, Beijer M R, Barendregt A, Shou K, Snijders A P, Dickman M J, Doudna J A, Boekema E J, Heck A J, van der Oost J, Brouns S J. Structural basis for CRISPR RNA-guided DNA recognition by Cascade. Nat Struct Mol Biol. 2011; 18(5):529-36. PMID: 21460843.
[0447] 13. Horvath P, Barrangou R. CRISPR/Cas, the immune system of bacteria and archaea. Science. 2010; 327(5962):167-70. PMID: 20056882.
[0448] 14. Wiedenheft B, Sternberg S H, Doudna J A. RNA-guided genetic silencing systems in bacteria and archaea. Nature. 2012; 482(7385):331-8. PMID: 22337052.
[0449] 15. Gasiunas G, Siksnys V. RNA-dependent DNA endonuclease Cas9 of the CRISPR system: Holy Grail of genome editing?Trends Microbiol. 2013; 21(11):562-7. PMID: 24095303.
[0450] 16. Qi L S, Larson M H, Gilbert L A, Doudna J A, Weissman J S, Arkin A P, Lim W A. Repurposing CRISPR as an RNA-guided platform for sequence-specific control of gene expression. Cell. 2013; 152(5):1173-83. PMID: 23452860.
[0451] 17. Perez-Pinera P, Kocak D D, Vockley C M, Adler A F, Kabadi A M, Polstein L R, Thakore P I, Glass K A, Ousterout D G, Leong K W, Guilak F, Crawford G E, Reddy T E, Gersbach C A. RNA-guided gene activation by CRISPR-Cas9-based transcription factors. Nat Methods. 2013; 10(10):973-6. PMID: 23892895.
[0452] 18. Mali P, Aach J, Stranges P B, Esvelt K M, Moosburner M, Kosuri S, Yang L, Church G M. CAS9 transcriptional activators for target specificity screening and paired nickases for cooperative genome engineering. Nat Biotechnol. 2013; 31(9):833-8. PMID: 23907171.
[0453] 19. Gilbert L A, Larson M H, Morsut L, Liu Z, Brar G A, Torres S E, Stern-Ginossar N, Brandman O, Whitehead E H, Doudna J A, Lim W A, Weissman J S, Qi L S. CRISPR-mediated modular RNA-guided regulation of transcription in eukaryotes. Cell. 2013; 154(2):442-51. PMID: 23849981.
[0454] 20. Larson M H, Gilbert L A, Wang X, Lim W A, Weissman J S, Qi L S. CRISPR interference (CRISPRi) for sequence-specific control of gene expression. Nat Protoc. 2013; 8(11):2180-96. PMID: 24136345.
[0455] 21. Mali P, Yang L, Esvelt K M, Aach J, Guell M, DiCarlo J E, Norville J E, Church G M. RNA-guided human genome engineering via Cas9. Science. 2013; 339(6121):823-6. PMID: 23287722.
[0456] 22. Cole-Strauss A, Yoon K, Xiang Y, Byrne B C, Rice M C, Gryn J, Holloman W K, Kmiec E B. Correction of the mutation responsible for sickle cell anemia by an RNA-DNA oligonucleotide. Science. 1996; 273(5280):1386-9. PMID: 8703073.
[0457] 23. Tagalakis A D, Owen J S, Simons J P. Lack of RNA-DNA oligonucleotide (chimeraplast) mutagenic activity in mouse embryos. Mol Reprod Dev. 2005; 71(2):140-4. PMID: 15791601.
[0458] 24. Ray A, Langer M. Homologous recombination: ends as the means. Trends Plant Sci. 2002; 7(10):435-40. PMID 12399177.
[0459] 25. Britt A B, May G D. Re-engineering plant gene targeting. Trends Plant Sci. 2003; 8(2):90-5. PMID: 12597876.
[0460] 26. Vagner V, Ehrlich S D. Efficiency of homologous DNA recombination varies along the Bacillus subtilis chromosome. J Bacteriol. 1988; 170(9):3978-82. PMID: 3137211.
[0461] 27. Saleh-Gohari N, Helleday T. Conservative homologous recombination preferentially repairs DNA double-strand breaks in the S phase of the cell cycle in human cells. Nucleic Acids Res. 2004; 32(12):3683-8. PMID: 15252152.
[0462] 28. Lombardo A, Genovese P, Beausejour C M, Colleoni S, Lee Y L, Kim K A, Ando D, Urnov F D, Galli C, Gregory P D, Holmes M C, Naldini L. Gene editing in human stem cells using zinc finger nucleases and integrase-defective lentiviral vector delivery. Nat Biotechnol. 2007; 25(11):1298-306. PMID: 17965707.
[0463] 29. Conticello S G. The AID/APOBEC family of nucleic acid mutators. Genome Biol. 2008; 9(6):229. PMID: 18598372.
[0464] 30. Reynaud C A, Aoufouchi S, Faili A, Weill J C. What role for AID: mutator, or assembler of the immunoglobulin mutasome?Nat Immunol. 2003; 4(7):631-8.
[0465] 31. Bhagwat A S. DNA-cytosine deaminases: from antibody maturation to antiviral defense. DNA Repair (Amst). 2004; 3(1):85-9. PMID: 14697763.
[0466] 32. Navaratnam N, Sarwar R. An overview of cytidine deaminases. Int J Hematol. 2006; 83(3):195-200. PMID: 16720547.
[0467] 33. Holden L G, Prochnow C, Chang Y P, Bransteitter R, Chelico L, Sen U, Stevens R C, Goodman M F, Chen X S. Crystal structure of the anti-viral APOBEC3G catalytic domain and functional implications. Nature. 2008; 456(7218):121-4. PMID: 18849968.
[0468] 34. Chelico L, Pham P, Petruska J, Goodman M F. Biochemical basis of immunological and retroviral responses to DNA-targeted cytosine deamination by activation-induced cytidine deaminase and APOBEC3G. J Biol Chem. 2009; 284(41). 27761-5. PMID: 19684020.
[0469] 35. Pham P, Bransteitter R, Goodman M F. Reward versus risk: DNA cytidine deaminases triggering immunity and disease. Biochemistry. 2005; 44(8):2703-15. PMID 15723516.
[0470] 36. Chen X, Zaro J L, Shen W C. Fusion protein linkers: property, design and functionality. Adv Drug Deliv Rev. 2013; 65(10):1357-69. PMID: 23026637.
[0471] 37. Lee J W, Soung Y H, Kim S Y, Lee H W, Park W S, Nam S W, Kim S H, Lee J Y, Yoo N J, Lee S H. PIK3CA gene is frequently mutated in breast carcinomas and hepatocellular carcinomas. Oncogene. 2005; 24(8):1477-80. PMID: 15608678.
[0472] 38. Ikediobi O N, Davies H, Bignell G, Edkins S, Stevens C, O'Meara S, Santarius T, Avis T, Barthorpe S, Brackenbury L, Buck G, Butler A, Clements J, Cole J, Dicks E, Forbes S, Gray K, Halliday K, Harrison R, Hills K, Hinton J, Hunter C, Jenkinson A, Jones D, Kosmidou V, Lugg R, Menzies A, Mironenko T, Parker A, Perry J, Raine K, Richardson D, Shepherd R, Small A, Smith R, Solomon H, Stephens P, Teaque J, Tofts C, Varian J, Webb T, West S, Widaa S, Yates A, Reinhold W, Weinstein J N, Stratton M R, Futreal P A, Wooster R. Mutation analysis of 24 known cancer genes in the NCI-60 cell line set. Mol Cancer Ther. 2006; 5(11):2606-12. PMID: 17088437.
[0473] 39. Cox, D. B., Platt, R. J. & Zhang, F. Therapeutic genome editing: prospects and challenges. Nature medicine 21, 121-131, doi:10.1038/nm.3793 (2015).
[0474] 40. Hilton, I. B. & Gersbach, C. A. Enabling functional genomics with genome engineering. Genome research 25, 1442-1455, doi:10.1101/gr.190124.115 (2015).
[0475] 41. Sander, J. D. & Joung, J. K. CRISPR-Cas systems for editing, regulating and targeting genomes. Nature biotechnology 32, 347-355, doi:10.1038/nbt.2842 (2014).
[0476] 42. Maruyama, T. et al. Increasing the efficiency of precise genome editing with CRISPR-Cas9 by inhibition of nonhomologous end joining. Nature biotechnology 33, 538-542, doi:10.1038/nbt.3190 (2015).
[0477] 43. Chu, V. T. et al. Increasing the efficiency of homology-directed repair for CRISPR-Cas9-induced precise gene editing in mammalian cells. Nature biotechnology 33, 543-548, doi:10.1038/nbt.3198 (2015).
[0478] 44. Lin, S., Staahl, B. T., Alla, R. K. & Doudna, J. A. Enhanced homology-directed human genome engineering by controlled timing of CRISPR/Cas9 delivery. eLife 3, e04766, doi:10.7554/eLife.04766 (2014).
[0479] 45. Cong, L. et al. Multiplex genome engineering using CRISPR/Cas systems. Science 339, 819-823, doi:10.1126/science.1231143 (2013).
[0480] 46. Rong, Z., Zhu, S., Xu, Y. & Fu, X. Homologous recombination in human embryonic stem cells using CRISPR/Cas9 nickase and a long DNA donor template. Protein & cell 5, 258-260, doi:10.1007/s13238-014-0032-5 (2014).
[0481] 47. Jinek, M. et al. A Programmable Dual-RNA-Guided DNA Endonuclease in Adaptive Bacterial Immunity. Science 337, 816-821, doi:10.1126/science.1225829 (2012).
[0482] 48. Harris, R. S., Petersen-Mahrt, S. K. & Neuberger, M. S. RNA Editing Enzyme APOBEC1 and Some of Its Homologs Can Act as DNA Mutators. Molecular Cell 10, 1247-1253 (2002).
[0483] 49. Jinek, M. et al. Structures of Cas9 endonucleases reveal RNA-mediated conformational activation. Science 343, 1247997, doi:10.1126/science.1247997 (2014).
[0484] 50. Schellenberger, V. et al. A recombinant polypeptide extends the in vivo half-life of peptides and proteins in a tunable manner. Nature biotechnology 27, 1186-1190, doi:10.1038/nbt.1588 (2009).
[0485] 51. Saraconi, G., Severi, F., Sala, C., Mattiuz, G. & Conticello, S. G. The RNA editing enzyme APOBEC1 induces somatic mutations and a compatible mutational signature is present in esophageal adenocarcinomas. Genome biology 15,417-(2014).
[0486] 52. Anders, C., Niewoehner, O., Duerst, A. & Jinek, M. Structural basis of PAM-dependent target DNA recognition by the Cas9 endonuclease. Nature 513, 569-573, doi:10.1038/nature13579 (2014).
[0487] 53. Cong, L. et al. Multiplex genome engineering using CRISPR/Cas systems. Science 339, 819-823 (2013).
[0488] 54. Tsai, S. Q. et al. GUIDE-seq enables genome-wide profiling of off-target cleavage by CRISPR-Cas nucleases. Nature biotechnology 33, 187-197, doi:10.1038/nbt.3117 (2015).
[0489] 55. Kunz, C., Saito, Y. & Schar, P. DNA Repair in mammalian cells: Mismatched repair: variations on a theme. Cellular and molecular life sciences: CMLS 66, 1021-1038, doi:10.1007/s00018-009-8739-9 (2009).
[0490] 56. D., M. C. et al. Crystal structure of human uracil-DNA glycosylase in complex with a protein inhibitor: protein mimicry of DNA. Cell 82, 701-708 (1995).
[0491] 57. Caldecott, K. W. Single-strand break repair and genetic disease. Nature reviews. Genetics 9, 619-631, doi:10.1038/nrg2380 (2008).
[0492] 58. Fukui, K. DNA mismatch repair in eukaryotes and bacteria. Journal of nucleic acids 2010, doi:10.4061/2010/260512 (2010).
[0493] 59. Gasiunas, G., Barrangou, R., Horvath, P. & Siksnys, V. Cas9-crRNA ribonucleoprotein complex mediates specific DNA cleavage for adaptive immunity in bacteria. Proceedings of the National Academy of Sciences 109, E2579-E2586, doi:10.1073/pnas.1208507109 (2012).
[0494] 60. Ran, F. A. et al. In vivo genome editing using Staphylococcus aureus Cas9. Nature 520, 186-191, doi:10.1038/nature14299 (2015).
[0495] 61. Kuscu, C., Arslan, S., Singh, R., Thorpe, J. & Adli, M. Genome-wide analysis reveals characteristics of off-target sites bound by the Cas9 endonuclease. Nature biotechnology 32, 677-683, doi:10.1038/nbt.2916(2014).
[0496] 62. Wu, X. et al. Genome-wide binding of the CRISPR endonuclease Cas9 in mammalian cells. Nature biotechnology 32, 670-676, doi:10.1038/nbt.2889 (2014).
[0497] 63. Beale, R. C. L. et al. Comparison of the Differential Context-dependence of DNA Deamination by APOBEC Enzymes: Correlation with Mutation Spectra in Vivo. Journal of Molecular Biology 337, 585-596, doi:10.1016/j.jmb.2004.01.046 (2004).
[0498] 64. Kim, J., Basak, J. M. & Holtzman, D. M. The role of apolipoprotein E in Alzheimer's disease. Neuron 63, 287-303, doi:10.1016/j.neuron.2009.06.026 (2009).
[0499] 65. Liu, C. C., Kanekiyo, T., Xu, H. & Bu, G. Apolipoprotein E and Alzheimer disease: risk, mechanisms and therapy. Nature reviews. Neurology 9, 106-118, doi:10.1038/nrneurol.2012.263 (2013).
[0500] 66. Sjöblom, T. et al. The Consensus Coding Sequences of Human Breast and Colorectal Cancers. Science 314, 268-274, doi:10.1126/science.1133427 (2006).
[0501] 67. Stephens, P. J. et al. The landscape of cancer genes and mutational processes in breast cancer. Nature 486, 400-404, doi:10.1038/nature11017 (2012).
[0502] 68. Landrum, M. J. et al. ClinVar: public archive of interpretations of clinically relevant variants. Nucleic Acids Research, doi:10.1093/nar/gkv1222 (2015).
[0503] 69. Slaymaker, I. M. et al. Rationally engineered Cas9 nucleases with improved specificity. Science, doi:10.1126/science.aad5227 (2015).
[0504] 70. Davis, K. M., Pattanayak, V., Thompson, D. B., Zuris, J. A. & Liu, D. R. Small molecule-triggered Cas9 protein with improved genome-editing specificity. Nature chemical biology 11, 316-318, doi:10.1038/nchembio.1793 (2015).
[0505] 71. Zuris, J. A. et al. Cationic lipid-mediated delivery of proteins enables efficient protein-based genome editing in vitro and in vivo. Nature biotechnology 33, 73-80, doi:10.1038/nbt.3081 (2015).
[0506] 72. Kleinstiver, B. P. et al. Engineered CRISPR-Cas9 nucleases with altered PAM specificities. Nature 523, 481-485, doi:10.1038/naturel4592 (2015).
[0507] 73. Pattanayak, V. et al. High-throughput profiling of off-target DNA cleavage reveals RNA-programmed Cas9 nuclease specificity. Nature Biotechnology 31, 839-843, doi:10.1038/nbt.2673 (2013).
[0508] 74. Shcherbakova, D. M. & Verkhusha, V. V. Near-infrared fluorescent proteins for multicolor in vivo imaging. Nature Methods 10, 751-754, doi:10.1038/nmeth.2521 (2013).
[0509] 75. Ran, F. A. et al. Genome engineering using the CRISPR-Cas9 system. Nat. Protocols 8, 2281-2308, doi:10.1038/nprot.2013.143 (2013).
[0510] 76. Jiang, F. et al. Structures of a CRISPR-Cas9 R-loop complex primed for DNA cleavage. Science, doi:10.1126/science.aad8282 (2016).
[0511] 77. Tsai, S. Q. et al. Dimeric CRISPR RNA-guided FokI nucleases for highly specific genome editing. Nat Biotech 32, 569-576, doi:10.1038/nbt.2908 (2014).
[0512] 78. Lieber, M. R., Ma, Y., Pannicke, U. & Schwarz, K. Mechanism and regulation of human non-homologous DNA end-joining. Nat Rev Mol Cell Biol 4, 712-720 (2003).
[0513] 79. Heller, R. C. & Marians, K. J. Replisome assembly and the direct restart of stalled replication forks. Nat Rev Mol Cell Biol 7, 932-943 (2006).
[0514] 80. Pluciennik, A. et al. PCNA function in the activation and strand direction of MutLα endonuclease in mismatch repair. Proceedings of the National Academy of Sciences of the United States of America 107, 16066-16071, doi:10.1073/pnas.1010662107 (2010).
[0515] 81. Seripa, D. et al. The missing ApoE allele. Annals of human genetics 71, 496-500, doi:10.1111/j.1469-1809.2006.00344.x (2007).
[0516] 82. Kleinstiver, B. P. et al. High-fidelity CRISPR-Cas9 nucleases with no detectable genome-wide off-target effects. Nature 529, 490-495, doi:10.1038/nature16526 (2016).
[0517] 83. Richardson, C. D., Ray, G. J., DeWitt, M. A., Curie, G. L. & Corn, J. E. Enhancing homology-directed genome editing by catalytically active and inactive CRISPR-Cas9 using asymmetric donor DNA. Nat Biotech 34, 339-344, doi:10.1038/nbt.3481 (2016).
[0518] 84. Simonelli, V., Narciso, L., Dogliotti, E. & Fortini, P. Base excision repair intermediates are mutagenic in mammalian cells. Nucleic acids research 33, 4404-4411, doi:10.1093/nar/gki749 (2005).
[0519] 85. Barnes, D. E. & Lindahl, T. Repair and Genetic Consequences of Endogenous DNA Base Damage in Mammalian Cells. Annual Review of Genetics 38, 445-476, doi:doi:10.1146/annurev.genet.38.072902.092448 (2004).

### EQUIVALENTS AND SCOPE

[0520] Those skilled in the art will recognize, or be able to ascertain using no more than routine experimentation, many equivalents of the embodiments described herein. The scope of the present disclosure is not intended to be limited to the above description, but rather is as set forth in the appended claims.

[0521] Articles such as “a,” “an,” and “the” may mean one or more than one unless indicated to the contrary or otherwise evident from the context. Claims or descriptions that include “or” between two or more members of a group are considered satisfied if one, more than one, or all of the group members are present, unless indicated to the contrary or otherwise evident from the context. The disclosure of a group that includes “or” between two or more group members provides embodiments in which exactly one member of the group is present, embodiments in which more than one members of the group are present, and embodiments in which all of the group members are present. For purposes of brevity those embodiments have not been individually spelled out herein, but it will be understood that each of these embodiments is provided herein and may be specifically claimed or disclaimed.

[0522] It is to be understood that the invention encompasses all variations, combinations, and permutations in which one or more limitation, element, clause, or descriptive term, from one or more of the claims or from one or more relevant portion of the description, is introduced into another claim. For example, a claim that is dependent on another claim can be modified to include one or more of the limitations found in any other claim that is dependent on the same base claim. Furthermore, where the claims recite a composition, it is to be understood that methods of making or using the composition according to any of the methods of making or using disclosed herein or according to methods known in the art, if any, are included, unless otherwise indicated or unless it would be evident to one of ordinary skill in the art that a contradiction or inconsistency would arise.

[0523] Where elements are presented as lists, e.g., in Markush group format, it is to be understood that every possible subgroup of the elements is also disclosed, and that any element or subgroup of elements can be removed from the group. It is also noted that the term “comprising” is intended to be open and permits the inclusion of additional elements or steps. It should be understood that, in general, where an embodiment, product, or method is referred to as comprising particular elements, features, or steps, embodiments, products, or methods that consist, or consist essentially of, such elements, features, or steps, are provided as well. For purposes of brevity those embodiments have not been individually spelled out herein, but it will be understood that each of these embodiments is provided herein and may be specifically claimed or disclaimed.

[0524] Where ranges are given, endpoints are included. Furthermore, it is to be understood that unless otherwise indicated or otherwise evident from the context and/or the understanding of one of ordinary skill in the art, values that are expressed as ranges can assume any specific value within the stated ranges in some embodiments, to the tenth of the unit of the lower limit of the range, unless the context clearly dictates otherwise. For purposes of brevity, the values in each range have not been individually spelled out herein, but it will be understood that each of these values is provided herein and may be specifically claimed or disclaimed. It is also to be understood that unless otherwise indicated or otherwise evident from the context and/or the understanding of one of ordinary skill in the art, values expressed as ranges can assume any subrange within the given range, wherein the endpoints of the subrange are expressed to the same degree of accuracy as the tenth of the unit of the lower limit of the range.

[0525] In addition, it is to be understood that any particular embodiment of the present invention may be explicitly excluded from any one or more of the claims. Where ranges are given, any value within the range may explicitly be excluded from any one or more of the claims. Any embodiment, element, feature, application, or aspect of the compositions and/or methods of the invention, can be excluded from any one or more claims. For purposes of brevity, all of the embodiments in which one or more elements, features, purposes, or aspects is excluded are not set forth explicitly herein

LENGTHY TABLES
The patent application contains a lengthy table section. A copy of the table is available in electronic form from the USPTO web site (https://seqdata.uspto.gov/?pageRequest=docDetail&DocID=US20250270527A1). An electronic copy of the table will also be available from the USPTO upon request and payment of the fee set forth in 37 CFR 1.19(b)(3).

The application's sequence listing, which the Patent Office published only in electronic form, follows.

SEQUENCE LISTING (5808 sequences)

SEQ ID NO: 1 - DNA, 4104 bp, Streptococcus pyogenes
  source 1..4104: mol_type = genomic DNA
atggataagaaatactcaataggcttagatatcggcacaaatagcgtcggatgggcggtgatcactgatgattataaggttccgtctaaaaagttcaaggttctgggaaatacagaccgccacagtatcaaaaaaaatcttataggggctcttttatttggcagtggagagacagcggaagcgactcgtctcaaacggacagctcgtagaaggtatacacgtcggaagaatcgtatttgttatctacaggagattttttcaaatgagatggcgaaagtagatgatagtttctttcatcgacttgaagagtcttttttggtggaagaagacaagaagcatgaacgtcatcctatttttggaaatatagtagatgaagttgcttatcatgagaaatatccaactatctatcatctgcgaaaaaaattggcagattctactgataaagcggatttgcgcttaatctatttggccttagcgcatatgattaagtttcgtggtcattttttgattgagggagatttaaatcctgataatagtgatgtggacaaactatttatccagttggtacaaatctacaatcaattatttgaagaaaaccctattaacgcaagtagagtagatgctaaagcgattctttctgcacgattgagtaaatcaagacgattagaaaatctcattgctcagctccccggtgagaagagaaatggcttgtttgggaatctcattgctttgtcattgggattgacccctaattttaaatcaaattttgatttggcagaagatgctaaattacagctttcaaaagatacttacgatgatgatttagataatttattggcgcaaattggagatcaatatgctgatttgtttttggcagctaagaatttatcagatgctattttactttcagatatcctaagagtaaatagtgaaataactaaggctcccctatcagcttcaatgattaagcgctacgatgaacatcatcaagacttgactcttttaaaagctttagttcgacaacaacttccagaaaagtataaagaaatcttttttgatcaatcaaaaaacggatatgcaggttatattgatgggggagctagccaagaagaattttataaatttatcaaaccaattttagaaaaaatggatggtactgaggaattattggtgaaactaaatcgtgaagatttgctgcgcaagcaacggacctttgacaacggctctattccccatcaaattcacttgggtgagctgcatgctattttgagaagacaagaagacttttatccatttttaaaagacaatcgtgagaagattgaaaaaatcttgacttttcgaattccttattatgttggtccattggcgcgtggcaatagtcgttttgcatggatgactcggaagtctgaagaaacaattaccccatggaattttgaagaagttgtcgataaaggtgcttcagctcaatcatttattgaacgcatgacaaactttgataaaaatcttccaaatgaaaaagtactaccaaaacatagtttgctttatgagtattttacggtttataacgaattgacaaaggtcaaatatgttactgagggaatgcgaaaaccagcatttctttcaggtgaacagaagaaagccattgttgatttactcttcaaaacaaatcgaaaagtaaccgttaagcaattaaaagaagattatttcaaaaaaatagaatgttttgatagtgttgaaatttcaggagttgaagatagatttaatgcttcattaggcgcctaccatgatttgctaaaaattattaaagataaagattttttggataatgaagaaaatgaagatatcttagaggatattgttttaacattgaccttatttgaagatagggggatgattgaggaaagacttaaaacatatgctcacctctttgatgataaggtgatgaaacagcttaaacgtcgccgttatactggttggggacgtttgtctcgaaaattgattaatggtattagggataagcaatctggcaaaacaatattagattttttgaaatcagatggttttgccaatcgcaattttatgcagctgatccatgatgatagtttgacatttaaagaagatattcaaaaagcacaggtgtctggacaaggccatagtttacatgaacagattgctaacttagctggcagtcctgctattaaaaaaggtattttacagactgtaaaaattgttgatgaactggtcaaagtaatggggcataagccagaaaatatcgttattgaaatggcacgtgaaaatcagacaactcaaaagggccagaaaaattcgcgagagcgtatgaaacgaatcgaagaaggtatcaaagaattaggaagtcagattcttaaagagcatcctgttgaaaatactcaattgcaaaatgaaaagctctatctctattatctacaaaatggaagagacatgtatgtggaccaagaattagatattaatcgtttaagtgattatgatgtcgatcacattgttccacaaagtttcattaaagacgattcaatagacaataaggtactaacgcgttctgataaaaatcgtggtaaatcggataacgttccaagtgaagaagtagtcaaaaagatgaaaaactattggagacaacttctaaacgccaagttaatcactcaacgtaagtttgataatttaacgaaagctgaacgtggaggtttgagtgaacttgataaagctggttttatcaaacgccaattggttgaaactcgccaaatcactaagcatgtggcacaaattttggatagtcgcatgaatactaaatacgatgaaaatgataaacttattcgagaggttaaagtgattaccttaaaatctaaattagtttctgacttccgaaaagatttccaattctataaagtacgtgagattaacaattaccatcatgcccatgatgcgtatctaaatgccgtcgttggaactgctttgattaagaaatatccaaaacttgaatcggagtttgtctatggtgattataaagtttatgatgttcgtaaaatgattgctaagtctgagcaagaaataggcaaagcaaccgcaaaatatttcttttactctaatatcatgaacttcttcaaaacagaaattacacttgcaaatggagagattcgcaaacgccctctaatcgaaactaatggggaaactggagaaattgtctgggataaagggcgagattttgccacagtgcgcaaagtattgtccatgccccaagtcaatattgtcaagaaaacagaagtacagacaggcggattctccaaggagtcaattttaccaaaaagaaattcggacaagcttattgctcgtaaaaaagactgggatccaaaaaaatatggtggttttgatagtccaacggtagcttattcagtcctagtggttgctaaggtggaaaaagggaaatcgaagaagttaaaatccgttaaagagttactagggatcacaattatggaaagaagttcctttgaaaaaaatccgattgactttttagaagctaaaggatataaggaagttaaaaaagacttaatcattaaactacctaaatatagtctttttgagttagaaaacggtcgtaaacggatgctggctagtgccggagaattacaaaaaggaaatgagctggctctgccaagcaaatatgtgaattttttatatttagctagtcattatgaaaagttgaagggtagtccagaagataacgaacaaaaacaattgtttgtggagcagcataagcattatttagatgagattattgagcaaatcagtgaattttctaagcgtgttattttagcagatgccaatttagataaagttcttagtgcatataacaaacatagagacaaaccaatacgtgaacaagcagaaaatattattcatttatttacgttgacgaatcttggagctcccgctgcttttaaatattttgatacaacaattgatcgtaaacgatatacgtctacaaaagaagttttagatgccactcttatccatcaatccatcactggtctttatgaaacacgcattgatttgagtcagctaggaggtgactga

SEQ ID NO: 2 - protein, 1367 aa, Streptococcus pyogenes
MDKKYSIGLDIGTNSVGWAVITDDYKVPSKKFKVLGNTDRHSIKKNLIGALLFGSGETAEATRLKRTARRRYTRRKNRICYLQEIFSNEMAKVDDSFFHRLEESFLVEEDKKHERHPIFGNIVDEVAYHEKYPTIYHLRKKLADSTDKADLRLIYLALAHMIKFRGHFLIEGDLNPDNSDVDKLFIQLVQIYNQLFEENPINASRVDAKAILSARLSKSRRLENLIAQLPGEKRNGLFGNLIALSLGLTPNFKSNFDLAEDAKLQLSKDTYDDDLDNLLAQIGDQYADLFLAAKNLSDAILLSDILRVNSEITKAPLSASMIKRYDEHHQDLTLLKALVRQQLPEKYKEIFFDQSKNGYAGYIDGGASQEEFYKFIKPILEKMDGTEELLVKLNREDLLRKQRTFDNGSIPHQIHLGELHAILRRQEDFYPFLKDNREKIEKILTFRIPYYVGPLARGNSRFAWMTRKSEETITPWNFEEVVDKGASAQSFIERMTNFDKNLPNEKVLPKHSLLYEYFTVYNELTKVKYVTEGMRKPAFLSGEQKKAIVDLLFKTNRKVTVKQLKEDYFKKIECFDSVEISGVEDRFNASLGAYHDLLKIIKDKDFLDNEENEDILEDIVLTLTLFEDRGMIEERLKTYAHLFDDKVMKQLKRRRYTGWGRLSRKLINGIRDKQSGKTILDFLKSDGFANRNFMQLIHDDSLTFKEDIQKAQVSGQGHSLHEQIANLAGSPAIKKGILQTVKIVDELVKVMGHKPENIVIEMARENQTTQKGQKNSRERMKRIEEGIKELGSQILKEHPVENTQLQNEKLYLYYLQNGRDMYVDQELDINRLSDYDVDHIVPQSFIKDDSIDNKVLTRSDKNRGKSDNVPSEEVVKKMKNYWRQLLNAKLITQRKFDNLTKAERGGLSELDKAGFIKRQLVETRQITKHVAQILDSRMNTKYDENDKLIREVKVITLKSKLVSDFRKDFQFYKVREINNYHHAHDAYLNAVVGTALIKKYPKLESEFVYGDYKVYDVRKMIAKSEQEIGKATAKYFFYSNIMNFFKTEITLANGEIRKRPLIETNGETGEIVWDKGRDFATVRKVLSMPQVNIVKKTEVQTGGFSKESILPKRNSDKLIARKKDWDPKKYGGFDSPTVAYSVLVVAKVEKGKSKKLKSVKELLGITIMERSSFEKNPIDFLEAKGYKEVKKDLIIKLPKYSLFELENGRKRMLASAGELQKGNELALPSKYVNFLYLASHYEKLKGSPEDNEQKQLFVEQHKHYLDEIIEQISEFSKRVILADANLDKVLSAYNKHRDKPIREQAENIIHLFTLTNLGAPAAFKYFDTTIDRKRYTSTKEVLDATLIHQSITGLYETRIDLSQLGGD

SEQ ID NO: 3 - DNA, 4212 bp, Streptococcus pyogenes
  source 1..4212: mol_type = genomic DNA
atggataaaaagtattctattggtttagacatcggcactaattccgttggatgggctgtcataaccgatgaatacaaagtaccttcaaagaaatttaaggtgttggggaacacagaccgtcattcgattaaaaagaatcttatcggtgccctcctattcgatagtggcgaaacggcagaggcgactcgcctgaaacgaaccgctcggagaaggtatacacgtcgcaagaaccgaatatgttacttacaagaaatttttagcaatgagatggccaaagttgacgattctttctttcaccgtttggaagagtccttccttgtcgaagaggacaagaaacatgaacggcaccccatctttggaaacatagtagatgaggtggcatatcatgaaaagtacccaacgatttatcacctcagaaaaaagctagttgactcaactgataaagcggacctgaggttaatctacttggctcttgcccatatgataaagttccgtgggcactttctcattgagggtgatctaaatccggacaactcggatgtcgacaaactgttcatccagttagtacaaacctataatcagttgtttgaagagaaccctataaatgcaagtggcgtggatgcgaaggctattcttagcgcccgcctctctaaatcccgacggctagaaaacctgatcgcacaattacccggagagaagaaaaatgggttgttcggtaaccttatagcgctctcactaggcctgacaccaaattttaagtcgaacttcgacttagctgaagatgccaaattgcagcttagtaaggacacgtacgatgacgatctcgacaatctactggcacaaattggagatcagtatgcggacttatttttggctgccaaaaaccttagcgatgcaatcctcctatctgacatactgagagttaatactgagattaccaaggcgccgttatccgcttcaatgatcaaaaggtacgatgaacatcaccaagacttgacacttctcaaggccctagtccgtcagcaactgcctgagaaatataaggaaatattctttgatcagtcgaaaaacgggtacgcaggttatattgacggcggagcgagtcaagaggaattctacaagtttatcaaacccatattagagaagatggatgggacggaagagttgcttgtaaaactcaatcgcgaagatctactgcgaaagcagcggactttcgacaacggtagcattccacatcaaatccacttaggcgaattgcatgctatacttagaaggcaggaggatttttatccgttcctcaaagacaatcgtgaaaagattgagaaaatcctaacctttcgcataccttactatgtgggacccctggcccgagggaactctcggttcgcatggatgacaagaaagtccgaagaaacgattactccatggaattttgaggaagttgtcgataaaggtgcgtcagctcaatcgttcatcgagaggatgaccaactttgacaagaatttaccgaacgaaaaagtattgcctaagcacagtttactttacgagtatttcacagtgtacaatgaactcacgaaagttaagtatgtcactgagggcatgcgtaaacccgcctttctaagcggagaacagaagaaagcaatagtagatctgttattcaagaccaaccgcaaagtgacagttaagcaattgaaagaggactactttaagaaaattgaatgcttcgattctgtcgagatctccggggtagaagatcgatttaatgcgtcacttggtacgtatcatgacctcctaaagataattaaagataaggacttcctggataacgaagagaatgaagatatcttagaagatatagtgttgactcttaccctctttgaagatcgggaaatgattgaggaaagactaaaaacatacgctcacctgttcgacgataaggttatgaaacagttaaagaggcgtcgctatacgggctggggacgattgtcgcggaaacttatcaacgggataagagacaagcaaagtggtaaaactattctcgattttctaaagagcgacggcttcgccaataggaactttatgcagctgatccatgatgactctttaaccttcaaagaggatatacaaaaggcacaggtttccggacaaggggactcattgcacgaacatattgcgaatcttgctggttcgccagccatcaaaaagggcatactccagacagtcaaagtagtggatgagctagttaaggtcatgggacgtcacaaaccggaaaacattgtaatcgagatggcacgcgaaaatcaaacgactcagaaggggcaaaaaaacagtcgagagcggatgaagagaatagaagagggtattaaagaactgggcagccagatcttaaaggagcatcctgtggaaaatacccaattgcagaacgagaaactttacctctattacctacaaaatggaagggacatgtatgttgatcaggaactggacataaaccgtttatctgattacgacgtcgatcacattgtaccccaatcctttttgaaggacgattcaatcgacaataaagtgcttacacgctcggataagaaccgagggaaaagtgacaatgttccaagcgaggaagtcgtaaagaaaatgaagaactattggcggcagctcctaaatgcgaaactgataacgcaaagaaagttcgataacttaactaaagctgagaggggtggcttgtctgaacttgacaaggccggatttattaaacgtcagctcgtggaaacccgccaaatcacaaagcatgttgcacagatactagattcccgaatgaatacgaaatacgacgagaacgataagctgattcgggaagtcaaagtaatcactttaaagtcaaaattggtgtcggacttcagaaaggattttcaattctataaagttagggagataaataactaccaccatgcgcacgacgcttatcttaatgccgtcgtagggaccgcactcattaagaaatacccgaagctagaaagtgagtttgtgtatggtgattacaaagtttatgacgtccgtaagatgatcgcgaaaagcgaacaggagataggcaaggctacagccaaatacttcttttattctaacattatgaatttctttaagacggaaatcactctggcaaacggagagatacgcaaacgacctttaattgaaaccaatggggagacaggtgaaatcgtatgggataagggccgggacttcgcgacggtgagaaaagttttgtccatgccccaagtcaacatagtaaagaaaactgaggtgcagaccggagggttttcaaaggaatcgattcttccaaaaaggaatagtgataagctcatcgctcgtaaaaaggactgggacccgaaaaagtacggtggcttcgatagccctacagttgcctattctgtcctagtagtggcaaaagttgagaagggaaaatccaagaaactgaagtcagtcaaagaattattggggataacgattatggagcgctcgtcttttgaaaagaaccccatcgacttccttgaggcgaaaggttacaaggaagtaaaaaaggatctcataattaaactaccaaagtatagtctgtttgagttagaaaatggccgaaaacggatgttggctagcgccggagagcttcaaaaggggaacgaactcgcactaccgtctaaatacgtgaatttcctgtatttagcgtcccattacgagaagttgaaaggttcacctgaagataacgaacagaagcaactttttgttgagcagcacaaacattatctcgacgaaatcatagagcaaatttcggaattcagtaagagagtcatcctagctgatgccaatctggacaaagtattaagcgcatacaacaagcacagggataaacccatacgtgagcaggcggaaaatattatccatttgtttactcttaccaacctcggcgctccagccgcattcaagtattttgacacaacgatagatcgcaaacgatacacttctaccaaggaggtgctagacgcgacactgattcaccaatccatcacgggattatatgaaactcggatagatttgtcacagcttgggggtgacggatcccccaagaagaagaggaaagtctcgagcgactacaaagaccatgacggtgattataaagatcatgacatcgattacaaggatgacgatgacaaggctgcagga

SEQ ID NO: 4 - protein, 1368 aa, Streptococcus pyogenes
MDKKYSIGLAIGTNSVGWAVITDEYKVPSKKFKVLGNTDRHSIKKNLIGALLFDSGETAEATRLKRTARRRYTRRKNRICYLQEIFSNEMAKVDDSFFHRLEESFLVEEDKKHERHPIFGNIVDEVAYHEKYPTIYHLRKKLVDSTDKADLRLIYLALAHMIKFRGHFLIEGDLNPDNSDVDKLFIQLVQTYNQLFEENPINASGVDAKAILSARLSKSRRLENLIAQLPGEKKNGLFGNLIALSLGLTPNFKSNFDLAEDAKLQLSKDTYDDDLDNLLAQIGDQYADLFLAAKNLSDAILLSDILRVNTEITKAPLSASMIKRYDEHHQDLTLLKALVRQQLPEKYKEIFFDQSKNGYAGYIDGGASQEEFYKFIKPILEKMDGTEELLVKLNREDLLRKQRTFDNGSIPHQIHLGELHAILRRQEDFYPFLKDNREKIEKILTFRIPYYVGPLARGNSRFAWMTRKSEETITPWNFEEVVDKGASAQSFIERMTNFDKNLPNEKVLPKHSLLYEYFTVYNELTKVKYVTEGMRKPAFLSGEQKKAIVDLLFKTNRKVTVKQLKEDYFKKIECFDSVEISGVEDRFNASLGTYHDLLKIIKDKDFLDNEENEDILEDIVLTLTLFEDREMIEERLKTYAHLFDDKVMKQLKRRRYTGWGRLSRKLINGIRDKQSGKTILDFLKSDGFANRNFMQLIHDDSLTFKEDIQKAQVSGQGDSLHEHIANLAGSPAIKKGILQTVKVVDELVKVMGRHKPENIVIEMARENQTTQKGQKNSRERMKRIEEGIKELGSQILKEHPVENTQLQNEKLYLYYLQNGRDMYVDQELDINRLSDYDVDHIVPQSFLKDDSIDNKVLTRSDKNRGKSDNVPSEEVVKKMKNYWRQLLNAKLITQRKFDNLTKAERGGLSELDKAGFIKRQLVETRQITKHVAQILDSRMNTKYDENDKLIREVKVITLKSKLVSDFRKDFQFYKVREINNYHHAHDAYLNAVVGTALIKKYPKLESEFVYGDYKVYDVRKMIAKSEQEIGKATAKYFFYSNIMNFFKTEITLANGEIRKRPLIETNGETGEIVWDKGRDFATVRKVLSMPQVNIVKKTEVQTGGFSKESILPKRNSDKLIARKKDWDPKKYGGFDSPTVAYSVLVVAKVEKGKSKKLKSVKELLGITIMERSSFEKNPIDFLEAKGYKEVKKDLIIKLPKYSLFELENGRKRMLASAGELQKGNELALPSKYVNFLYLASHYEKLKGSPEDNEQKQLFVEQHKHYLDEIIEQISEFSKRVILADANLDKVLSAYNKHRDKPIREQAENIIHLFTLTNLGAPAAFKYFDTTIDRKRYTSTKEVLDATLIHQSITGLYETRIDLSQLGGD

SEQ ID NO: 5 - protein, 5 aa, synthetic construct
  REGION 1..5: note = Synthetic Polypeptide
GGGGS

SEQ ID NO: 6 - protein, 5 aa, synthetic construct
  REGION 1..5: note = Synthetic Polypeptide
EAAAK

SEQ ID NO: 7 - protein, 16 aa, synthetic construct
  REGION 1..16: note = Synthetic Polypeptide
SGSETPGTSESATPES

SEQ ID NO: 8 - DNA, 4107 bp, Streptococcus pyogenes
  source 1..4107: mol_type = genomic DNA
atggataagaaatactcaataggcttagatatcggcacaaatagcgtcggatgggcggtgatcactgatgaatataaggttccgtctaaaaagttcaaggttctgggaaatacagaccgccacagtatcaaaaaaaatcttataggggctcttttatttgacagtggagagacagcggaagcgactcgtctcaaacggacagctcgtagaaggtatacacgtcggaagaatcgtatttgttatctacaggagattttttcaaatgagatggcgaaagtagatgatagtttctttcatcgacttgaagagtcttttttggtggaagaagacaagaagcatgaacgtcatcctatttttggaaatatagtagatgaagttgcttatcatgagaaatatccaactatctatcatctgcgaaaaaaattggtagattctactgataaagcggatttgcgcttaatctatttggccttagcgcatatgattaagtttcgtggtcattttttgattgagggagatttaaatcctgataatagtgatgtggacaaactatttatccagttggtacaaacctacaatcaattatttgaagaaaaccctattaacgcaagtggagtagatgctaaagcgattctttctgcacgattgagtaaatcaagacgattagaaaatctcattgctcagctccccggtgagaagaaaaatggcttatttgggaatctcattgctttgtcattgggtttgacccctaattttaaatcaaattttgatttggcagaagatgctaaattacagctttcaaaagatacttacgatgatgatttagataatttattggcgcaaattggagatcaatatgctgatttgtttttggcagctaagaatttatcagatgctattttactttcagatatcctaagagtaaatactgaaataactaaggctcccctatcagcttcaatgattaaacgctacgatgaacatcatcaagacttgactcttttaaaagctttagttcgacaacaacttccagaaaagtataaagaaatcttttttgatcaatcaaaaaacggatatgcaggttatattgatgggggagctagccaagaagaattttataaatttatcaaaccaattttagaaaaaatggatggtactgaggaattattggtgaaactaaatcgtgaagatttgctgcgcaagcaacggacctttgacaacggctctattccccatcaaattcacttgggtgagctgcatgctattttgagaagacaagaagacttttatccatttttaaaagacaatcgtgagaagattgaaaaaatcttgacttttcgaattccttattatgttggtccattggcgcgtggcaatagtcgttttgcatggatgactcggaagtctgaagaaacaattaccccatggaattttgaagaagttgtcgataaaggtgcttcagctcaatcatttattgaacgcatgacaaactttgataaaaatcttccaaatgaaaaagtactaccaaaacatagtttgctttatgagtattttacggtttataacgaattgacaaaggtcaaatatgttactgaaggaatgcgaaaaccagcatttctttcaggtgaacagaagaaagccattgttgatttactcttcaaaacaaatcgaaaagtaaccgttaagcaattaaaagaagattatttcaaaaaaatagaatgttttgatagtgttgaaatttcaggagttgaagatagatttaatgcttcattaggtacctaccatgatttgctaaaaattattaaagataaagattttttggataatgaagaaaatgaagatatcttagaggatattgttttaacattgaccttatttgaagatagggagatgattgaggaaagacttaaaacatatgctcacctctttgatgataaggtgatgaaacagcttaaacgtcgccgttatactggttggggacgtttgtctcgaaaattgattaatggtattagggataagcaatctggcaaaacaatattagattttttgaaatcagatggttttgccaatcgcaattttatgcagctgatccatgatgatagtttgacatttaaagaagacattcaaaaagcacaagtgtctggacaaggcgatagtttacatgaacatattgcaaatttagctggtagccctgctattaaaaaaggtattttacagactgtaaaagttgttgatgaattggtcaaagtaatggggcggcataagccagaaaatatcgttattgaaatggcacgtgaaaatcagacaactcaaaagggccagaaaaattcgcgagagcgtatgaaacgaatcgaagaaggtatcaaagaattaggaagtcagattcttaaagagcatcctgttgaaaatactcaattgcaaaatgaaaagctctatctctattatctccaaaatggaagagacatgtatgtggaccaagaattagatattaatcgtttaagtgattatgatgtcgatcacattgttccacaaagtttccttaaagacgattcaatagacaataaggtcttaacgcgttctgataaaaatcgtggtaaatcggataacgttccaagtgaagaagtagtcaaaaagatgaaaaactattggagacaacttctaaacgccaagttaatcactcaacgtaagtttgataatttaacgaaagctgaacgtggaggtttgagtgaacttgataaagctggttttatcaaacgccaattggttgaaactcgccaaatcactaagcatgtggcacaaattttggatagtcgcatgaatactaaatacgatgaaaatgataaacttattcgagaggttaaagtgattaccttaaaatctaaattagtttctgacttccgaaaagatttccaattctataaagtacgtgagattaacaattaccatcatgcccatgatgcgtatctaaatgccgtcgttggaactgctttgattaagaaatatccaaaacttgaatcggagtttgtctatggtgattataaagtttatgatgttcgtaaaatgattgctaagtctgagcaagaaataggcaaagcaaccgcaaaatatttcttttactctaatatcatgaacttcttcaaaacagaaattacacttgcaaatggagagattcgcaaacgccctctaatcgaaactaatggggaaactggagaaattgtctgggataaagggcgagattttgccacagtgcgcaaagtattgtccatgccccaagtcaatattgtcaagaaaacagaagtacagacaggcggattctccaaggagtcaattttaccaaaaagaaattcggacaagcttattgctcgtaaaaaagactgggatccaaaaaaatatggtggttttgatagtccaacggtagcttattcagtcctagtggttgctaaggtggaaaaagggaaatcgaagaagttaaaatccgttaaagagttactagggatcacaattatggaaagaagttcctttgaaaaaaatccgattgactttttagaagctaaaggatataaggaagttaaaaaagacttaatcattaaactacctaaatatagtctttttgagttagaaaacggtcgtaaacggatgctggctagtgccggagaattacaaaaaggaaatgagctggctctgccaagcaaatatgtgaattttttatatttagctagtcattatgaaaagttgaagggtagtccagaagataacgaacaaaaacaattgtttgtggagcagcataagcattatttagatgagattattgagcaaatcagtgaattttctaagcgtgttattttagcagatgccaatttagataaagttcttagtgcatataacaaacatagagacaaaccaatacgtgaacaagcagaaaatattattcatttatttacgttgacgaatcttggagctcccgctgcttttaaatattttgatacaacaattgatcgtaaacgatatacgtctacaaaagaagttttagatgccactcttatccatcaatccatcactggtctttatgaaacacgcattgatttgagtcagctaggaggtgactga

SEQ ID NO: 9 - protein, 1368 aa, synthetic construct
  REGION 1..1368: note = Synthetic Polypeptide
MDKKYSIGLAIGTNSVGWAVITDEYKVPSKKFKVLGNTDRHSIKKNLIGALLFDSGETAEATRLKRTARRRYTRRKNRICYLQEIFSNEMAKVDDSFFHRLEESFLVEEDKKHERHPIFGNIVDEVAYHEKYPTIYHLRKKLVDSTDKADLRLIYLALAHMIKFRGHFLIEGDLNPDNSDVDKLFIQLVQTYNQLFEENPINASGVDAKAILSARLSKSRRLENLIAQLPGEKKNGLFGNLIALSLGLTPNFKSNFDLAEDAKLQLSKDTYDDDLDNLLAQIGDQYADLFLAAKNLSDAILLSDILRVNTEITKAPLSASMIKRYDEHHQDLTLLKALVRQQLPEKYKEIFFDQSKNGYAGYIDGGASQEEFYKFIKPILEKMDGTEELLVKLNREDLLRKQRTFDNGSIPHQIHLGELHAILRRQEDFYPFLKDNREKIEKILTFRIPYYVGPLARGNSRFAWMTRKSEETITPWNFEEVVDKGASAQSFIERMTNFDKNLPNEKVLPKHSLLYEYFTVYNELTKVKYVTEGMRKPAFLSGEQKKAIVDLLFKTNRKVTVKQLKEDYFKKIECFDSVEISGVEDRFNASLGTYHDLLKIIKDKDFLDNEENEDILEDIVLTLTLFEDREMIEERLKTYAHLFDDKVMKQLKRRRYTGWGRLSRKLINGIRDKQSGKTILDFLKSDGFANRNFMQLIHDDSLTFKEDIQKAQVSGQGDSLHEHIANLAGSPAIKKGILQTVKVVDELVKVMGRHKPENIVIEMARENQTTQKGQKNSRERMKRIEEGIKELGSQILKEHPVENTQLQNEKLYLYYLQNGRDMYVDQELDINRLSDYDVDAIVPQSFLKDDSIDNKVLTRSDKNRGKSDNVPSEEVVKKMKNYWRQLLNAKLITQRKFDNLTKAERGGLSELDKAGFIKRQLVETRQITKHVAQILDSRMNTKYDENDKLIREVKVITLKSKLVSDFRKDFQFYKVREINNYHHAHDAYLNAVVGTALIKKYPKLESEFVYGDYKVYDVRKMIAKSEQEIGKATAKYFFYSNIMNFFKTEITLANGEIRKRPLIETNGETGEIVWDKGRDFATVRKVLSMPQVNIVKKTEVQTGGFSKESILPKRNSDKLIARKKDWDPKKYGGFDSPTVAYSVLVVAKVEKGKSKKLKSVKELLGITIMERSSFEKNPIDFLEAKGYKEVKKDLIIKLPKYSLFELENGRKRMLASAGELQKGNELALPSKYVNFLYLASHYEKLKGSPEDNEQKQLFVEQHKHYLDEIIEQISEFSKRVILADANLDKVLSAYNKHRDKPIREQAENIIHLFTLTNLGAPAAFKYFDTTIDRKRYTSTKEVLDATLIHQSITGLYETRIDLSQLGGD

SEQ ID NO: 10 - protein, 1368 aa, Streptococcus pyogenes [sequence omitted]

SEQ ID NO: 11 - protein, 1359 aa, Streptococcus pyogenes
MDKKYSIGLDIGTNSVGWAVITDEYKVPSKKFKVLGNTDRHSIKKNLIGALLFDSGETAEATRLKRTARRRYTRRKNRICYLQEIFSNEMAKVDDSFFHRLEESFLVEEDKKHERHPIFGNIVDEVAYHEKYPTIYHLRKKLVDSTDKADLRLIYLALAHMIKFRGHFLIEGDLNPDNSDVDKLFIQLVQTYNQLFEENINASGVDAKAILSARLSKSRRLENLIAQLPGEKKNGLFGNLIALSLGLTPNFKSNFDLAEDAKLQLSKDTYDDDLDNLLAQIGDQYADLFLAAKNLSDAILLSDILRVNTEITKAPLSASMIKRYDEHHQDLTLLKALVRQQLPEKYKEIFFDQSKNGYAGYIDGGASQEEFYKFIKPILEKMDGTEELLVKLNREDLLRKQRTFDNGSIPHQIHLGELHAILRRQEDFYPFLKDNREKIEKILTFRIPYYVGPLARGNSRFAWMTRKSEETITPWNFEEVVDKGASAQSFIERMTNFDKNLPNEKVLPKHSLLYEYFTVYNELTKVKYVTEGMRKPAFLSGEQKKAIVDLLFKTNRKVTVKQLKEDYFKKIECFDSVEISGVEDRFNASLGTYHDLLKIIKDKDFLDNEENEDILEDIVLTLTLFEDREMIEERLKTYAHLFDDKVMKQLKRRRYTGWGRLSRKLINGIRDKQSGKTILDFLKDGFANRNFMQLIHDDSLTFKEDIQKAQVSGQGDSLHEHIANLAGSPAIKKGILQTVKVVDELVKVMGRHKPENIVIEMARENQTTQKGQKNSRERMKRIEEGIKELGSQILKEHPVENTQLQNEKLYLYYLQNGRDMYVDQELDINRLSDYDVDHIVPQSFLKDDSIDNKVLTRSDKNRGKSDNVPSEEVVKKMKNYWRQLLNAKLITQRKFDNLTKAERGGLSELDKAGFIKRQLVETRQITKHVAQILDSRMNTKYDENDKLIREVKVITLKSKLVSDFRKDFQFYKVREINNYHHAHDAYLNAVVGTALIKKYPKLESEFVYGDYKVYDVSEQEIGKATAKYFFYSNIMNFFKTEITLANGEIRKRPLIETNGETGEIVWDKGRDFATVRKVLSMPQVNIVKKTEVQTGGFSKESILPKRNSDKLIARKKDWDPKKYGGFDSPTVAYSVLVVAKVEKGKSKKLKSVKELLGITIMERSSFEKNPIDFLEAKGYKEVKKDLIIKLPKYSLFELENGRKRMLASGELQKGNELALPSKYVNFLYLASHYEKLKGSPEDNEQKQLFVEQHKHYLDEIIEQISEFSKRVILADANLDKVLSAYNKHRDKPIREQAENIIHLFTLTNLGAPAAFKYFDTTIDRKRYTSTKEVLDATLIHQSITGLYETRIDLSQLGGD

SEQ ID NO: 12 - protein, 1355 aa, Streptococcus gallolyticus
MTKKNYSIGLDIGTNSVGWAVITDDYKVPAKKMKVLGNTDKKYIKKNLLGALLFDSGETAEATRLKRTARRRYTRRKNRLRYLQEIFANEIAKVDESFFQRLDESFLTDDDKTFDSHPIFGNKAEEDAYHQKFPTIYHLRKHLADSSEKADLRLVYLALAHMIKFRGHFLIEGELNAENTDVQKIFADFVGVYNRTFDDSHLSEITVDVASILTEKISKSRRLENLIKYYPTEKKNTLFGNLIALALGLQPNFKTNFKLSEDAKLQFSKDTYEEDLEELLGKIGDDYADLFTSAKNLYDAILLSGILTVDDNSTKAPLSASMIKRYVEHHEDLEKLKEFIKANKSELYHDIFKDKNKNGYAGYIENGVKQDEFYKYLKNILSKIKIDGSDYFLDKIEREDFLRKQRTFDNGSIPHQIHLQEMHAILRRQGDYYPFLKEKQDRIEKILTFRIPYYVGPLVRKDSRFAWAEYRSDEKITPWNFDKVIDKEKSAEKFITRMTLNDLYLPEEKVLPKHSHVYETYAVYNELTKIKYVNEQGKESFFDSNMKQEIFDHVFKENRKVTKEKLLNYLNKEFPEYRIKDLIGLDKENKSFNASLGTYHDLKKILDKAFLDDKVNEEVIEDIIKTLTLFEDKDMIHERLQKYSDIFTANQLKKLERRHYTGWGRLSYKLINGIRNKENNKTILDYLIDDGSANRNFMQLINDDTLPFKQIIQKSQVVGDVDDIEAVVHDLPGSPAIKKGILQSVKIVDELVKVMGGNPDNIVIEMARENQTTNRGRSQSQQRLKKLQNSLKPSYIEDKVENSHLQNDQLFLYYIQNGKDMYTGDELDIDHLSDYDIDHIIPQAFIKDDSIDNRVLTSSAKNRGKSDDVPSLDIVRARKAEWVRLYKSGLISKRKFDNLTKAERGGLTEADKAGFIKRQLVETRQITKHVAQILDARFNTEHDENDKVIRDVKVITLKSNLVSQFRKDFEFYKVREINDYHHAHDAYLNAVVGTALLKKYPKLASEFVYGEYKKYDISSDKATAKYFFYSNLMNFFKTKVKYADGTVFERPIIETNADGEIAWNKQIDFEKVRKVLSYPQVNIVKKVETQTGGFSKESILPKGDSDKLIPRKTKKVYWDTKKYGGFDSPTVAYSVFVVADVEKGKAKKLKTVKELVGISIMERSFFEENPVEFLENKGYHNIREDKLIKLPKYSLFEFEGGRRRLLASASELQKGNEMVLPGYLVELLYHAHRADNFNSTEYLNYVSEHKKEFEKVLSCVEDFANLYVDVEKNLSKIRAVADSMDNFSIEEISNSFINLLTLTALGAPADFNFLGEKIPRKRYTSTKECLNATLIHQSITGLYETRIDLSKLGEE

SEQ ID NO: 13 - protein, 1359 aa, Streptococcus mitis
KKGYSIGLDIGTNSVGFAVITDDYKVPSKKMKVLGNTDKRFIKKNLIGALLFDEGTTAEARRLKRTARRRYTRRKNRLRYLQEIFSEEMSKVDSSFFHRLDDSFLIPEDKRESKYPIFATLTEEKEYHKQFPTIYHLRKQLADSKEKTDLRLIYLALAHMIKYRGHFLYEEAFDIKNNDIQKIFNEFISIYDNTFEGSSLSGQNAQVEAIFTDKISKSAKRERVLKLFPDEKSTGLFSEFLKLIVGNQADFKKHFDLEDKAPLQFSKDTYDEDLENLLGQIGDDFTDLFVSAKKLYDAILLSGILTVTDPSTKAPLSASMIERYENHQNDLAALKQFIKNNLPEKYDEVFSDQSKDGYAGYIDGKTTQETFYKYIKNLLSKFEGTDYFLDKIEREDFLRKQRTFDNGSIPHQIHLQEMNAILRRQGEYYPFLKDNKEKIEKILTFRIPYYVGPLARGNRDFAWLTRNSDEAIRPWNFEEIVDKASSAEDFINKMTNYDLYLPEEKVLPKHSLLYETFAVYNELTKVKFIAEGLRDYQFLDSGQKKQIVNQLFKENRKVTEKDIIHYLHNVDGYDGIELKGIEKQFNASLSTYHDLLKIIKDKEFMDDAKNEAILENIVHTLTIFEDREMIKQRLAQYDSLFDEKVIKALTRRHYTGWGKLSAKLINGICDKQTGNTILDYLIDDGKINRNFMQLINDDGLSFKEIIQKAQVIGKTDDVKQVVQELSGSPAIKKGILQSIKIVDELVKVMGHAPESIVIEMARENQTTARGKKNSQQRYKRIEDSLKILASNILKENPTDNNQLQNDRLFLYYLQNGKDMYTGEALDINQLSSYDIDHIIPQAFIKDDSLDNRVLTSSKDNRGKSDNVPSIEVVQKRKAFWQQLLDSKLISERKFNNLTKAERGGLDERDKVGFIKRQLVETRQITKHVAQILDARYNTEVNEKDKKNRTVKIITLKSNLVSNFRKEFRLYKVREINDYHHAHDAYLNAVVAKAILKKYPKLEPEFVYGEYQKYDLSKDPKEVEKATEKYFFYSNLLNFFKEEVHYADGTIVKRENIEYSKDTGEIAWNKEKDFAIIKKVLSLPQVNIVKKREVQTGGFSKESILPKGNSDKLIPRKTKDILLDTTKYGGFDSPVIAYSILLIADIEKGKAKKLKTVKTLVGITIMEKAAFEENPITFLENKGYHNVRKENILCLPKYSLFELENGRRRLLASAKELQKGNEIVLPVYLTTLLYHSKNVHKLDEPGHLEYIQKHRNEFKDLLNLVSEFSQKYVLADANLEKIKSLYADNEQADIEILANSFINLLTFTALGAPAAFKFFGKDIDRKRYTTVSEILNATLIHQSITGLYETWIDLSKLGED

SEQ ID NO: 14 - protein, 986 aa, Staphylococcus aureus
MKRNYILGLDIGITSVGYGIIDYETRDVIDAGVRLFKEANVENNEGRRSKRGARRLKRRRRHRIQRVKKLLFDYNLLTDHSELSGNPYEARVKGLSQKLSEEEFSAALLHLAKRRGVHNVNEVEEDTGNELSTKEQISRNSKLEEKYVAELQLERLKKDGEVRGSINRKTSDYVKEAKQLLKVQKAYHQLDQSFIDTYIDLLETRRTYYEGPGEGSPFGWKDIKEWYEMLMGHCTYFPEELRSVKYAYNADLYNALNDLNNLVITRDENEKLEYYEKFQIIENVFKQKKKPTLKQIAKEILVNEEDIKGYRVTSTGKPEFTNLKVYHDIKDITARKENAELLDQIAKILTIYQSSEDIQEELTNLNSELTQEEIEQISNLKGYTGTHNLSLKAINLILDELWTNDNQIAIFNRLKLVPKKVDLSQQKEIPTTLVDDFILSPVVKRSFIQSIKVINAIIKKYGLPNDIIIELAREKNSKDAQKMINEMQKQTNEEIIRTTGKENAKYLIEKIKLHDMQEGKCLYSLEAIPLEDLLNNPFNYEVDHIIPRSVSFDNSFNNKVLVKQEEASKKGNRTPFQYLSSSDSKISYETFKKHILNLAKGKGRISKTKKEYLLEERDQKDFINRNLVDTRYATRGLMNLLRSYFRVNNLDVKVKSINGGFTSFLRRKWKFKKERNKGYKHHAEDALIIANADFIFKEWKKLDKNQMFEEKETEQEYKEIFITPHQIKHIKDFKDYKYSHRVDKKPNREVNNLNGLYDKDNDKLKKLINKSPEKLLMYHHDPQTYQKKLIMEQYGDEKNLYKYYEETGNYLTKYSKKDNGPVIKKIKYYGNKLNAHLDITDDYPNSVKLSLKPYRFDVYLDNGVYKFVTVKNLDVIKKENYYEVNSKAYEEAKKKKISNQAEFIASFYNNDLIKINGELYRVIGVNNDLLNRIEVNMIDITYREYLENMNDKRPPRIIKTIASKTQSIKKLYEVKSKKHPQIIKKG

SEQ ID NO: 15 - protein, 1044 aa, Streptococcus pyogenes
LSASMIKRYDEHHQDLTLLKALVRQQLPEKYKEIFFDQSKNGYAGYIDGGASQEEFYKFIKPILEKMDGTEELLAKLNREDLLRKQRTFDNGSIPHQIHLGELHAILRRQEDFYPFLKDNREKIEKILTFRIPYYVGPLARGNSRFAWMTRKSEETITPWNFEEVVDKGASAQSFIERMTNFDKNLPNEKVLPKHSLLYEYFTVYNELTKVKYVTEGMRKPAFLSGEQKKAIVDLLFKTNRKVTVKQLKEDYFKKIECFDSVEISGVEDRFNASLGTYHDLLKIIKDKDFLDNEENEDILEDIVLTLTLFEDREMIEERLKTYAHLFDDKVMKQLKRRRYTGWGRLSRKLINGIRDKQSGKTILDFLKDGFANRNFMQLIHDDSLTFKEDLQKAQVSGQGDSLHEHIANLAGSPAIKKGILQTVKVVDELVKVMGRHKPENIVIEMARENQTTQKGQKNSRERMKRIEEGIKELGSDILKEYPVENTQLQNEKLYLYYLQNGRDMYVDQELDINRLSDYDVDHIVPQSFLKDDSIDNKVLTRSDKNRGKSDNVPSEEVVKKMKNYWKQLLNAKLITQRKFDNLTKAERGGLSELDKAGFIKRQLVETRQITKHVAQILDSRMNTKYDENDKLIREVRVITLKSKLVSDFRKDFQFYKVREINNYHHAHDAYLNAVVGTALIKKYPKLESEFVYGDYKVYDISEQEIGKATAKYFFYSNIMNFFKTEITLANGEIRKRPLIETNGETGEIVWDKGRDFATVRKVLSMPQVNIVKKTEVQTGGFSKESILPKRNSDKLIARKKDWDPKKYGGFDSPTVAYSVLVVAKVEKGKSKKLKSVKELVGITIMERSSFEKDPVDFLEAKGYKEVRKDLIIKLPKYSLFELENGRKRMLASGELQKGNELALPSKYVNFLYLASHYEKLKGSPEDNEQKQLFVEQHKHYLDEIIEQISEFSKRVILADANLDKVLSAYNKHRDKPIREQAENIIHLFTLTNLGAPAAFKCFDTTIGRNRYKSIKEVLDATLIHQSITGLYETRIDLSQLGGD

SEQ ID NO: 16 - protein, 1359 aa, Streptococcus pyogenes; identical to SEQ ID NO: 11

SEQ ID NO: 17 - protein, 1359 aa, Streptococcus pyogenes
MDKKYSIGLDIGTNSVGWAVITDDYKVPSKKLKGLGNTDRHGIKKNLIGALLFDSGETAEATRLKRTARRRYTRRKNRICYLQEIFSNEMAKVDDSFFHRLEESFLVEEDKKHERHPIFGNIVDEVAYHEKYPTIYHLRKKLADSTDKVDLRLIYLALAHMIKFRGHFLIEGDLNPDNSDVDKLFIQLVQTYNQLFEENINASRVDAKAILSARLSKSRRLENLIAQLPGEKKNGLFGNLIALSLGLTPNFKSNFDLAEDAKLQLSKDTYDDDLDNLLAQIGDQYADLFLAAKNLSDATLLSDILRVNSEITKAPLSASMIKRYDEHHQDLTLLKALVRQQLPEKYKEIFFDQSKNGYAGYIDGGASQEEFYKFIKPILEKMDGTEELLAKLNREDLLRKQRTFDNGSIPYQIHLGELHAILRRQEDFYPFLKDNREKIEKILTFRIPYYVGPLARGNSRFAWMTRKSEETITPWNFEEVVDKGASAQSFIERMTNFDKNLPNEKVLPKHSLLYEYFTVYNELTKVKYVTEGMRKPAFLSGEQKKAIVDLLFKTNRKVTVKQLKEDYFKKIECFDSVEISGVEDRFNASLGTYHDLLKIIKDKDFLDNEENEDILEDIVLTLTLFEDREMIEERLKTYAHLFDDKVMKQLKRRRYTGWGRLSRKLINGIRDKQSGKTILDFLKDGFANRNFMQLIHDDSLTFKEDIQKAQVSGQGDSLHEHIANLAGSPAIKKGILQTVKVVDELVKVMGRHKPENIVIEMARENQTTQKGQKNSRERMKRIEEGIKELGSDILKEYPVENTQLQNEKLYLYYLQNGRDMYVDQELDINRLSDYDVDHIVPQSFLKDDSIDNKVLTRSDKNRGKSDNVPSEEVVKKMKNYWRQLLNAKLITQRKFDNLTKAERGGLSELDKVGFIKRQLVETRQITKHVAQILDSRMNTKYDENDKLIREVRVITLKSKLVSDFRKDFQFYKVREINNYHHAHDAYLNAVVGTALIKKYPKLESEFVYGDYKVYDVSEQEIGKATAKYFFYSNIMNFFKTEITLANGEIRKRPLIETNGETGEIVWDKGRDFATVRKVLSMPQVNIVKKTEVQTGGFSKESILPKRNSDKLIARKKDWDPKKYGGFDSPTVAYSVLVVAKVEKGKSKKLKSVKELLGITIMERSSFEKDPIDFLEAKGYKEVRKDLIIKLPKYSLFELENGRKRMLASGELQKGNELALPSKYVNFLYLASHYEKLKGSPEDNEQKQLFVEQHKHYLDEIIEQISEFSKRVILADANLDKVLSAYNKHRDKPIREQAENIIHLFTLTNLGAPAAFKYFDTTIDRKRYTSTKEVLDATLIHQSITGLYETRIDLSQLGGD

SEQ ID NO: 18 - protein, 1359 aa, Streptococcus pyogenes
MDKKYSIGLDIGTNSVGWAVITDDYKVPSKKFKVLGNTDRHSIKKNLIGALLFDSGETAEATRLKRTARRRYTRRKNRICYLQEIFSNEMAKVDDSFFHRLEESFLVEEDKKHERHPIFGNIVDEVAYHEKYPTIYHLRKKLVDSTDKADLRLIYLALAHMIKFRGHFLIEGDLNPDNSDVDKLFIQLVQTYNQLFEENINASGVDAKAILSARLSKSRRLENLIAQLPGEKKNGLFGNLIALSLGLTPNFKSNFDLAEDAKLQLSKDTYDDDLDNLLAQIGDQYADLFLAAKNLSDAILLSDILRLNSEITKAPLSASMIKRYDEHHQDLTLLKALVRQQLPEKYKEIFFDQSKNGYAGYIDGGASQEEFYKFIKPILEKMDGTEELLAKLNREDLLRKQRTFDNGSIPHQIHLGELHAILRRQEDFYPFLKDNREKIEKILTFRIPYYVGPLARGNSRFAWMTRKSEETITPWNFEEVVDKGASAQSFIERMTNFDKNLPNEKVLPKHSLLYEYFTVYNELTKVKYVTEGMRKPAFLSGEQKKAIVDLLFKTNRKVTVKQLKEDYFKKIECFDSVEISGVEDRFNASLGTYHDLLKIIKDKDFLDNEENEDILEDIVLTLTLFEDREMIEERLKTYAHLFDDKVMKQLKRRRYTGWGRLSRKLINGIRDKQSGKTILDFLKDGFANRNFMQLIHDDSLTFKEDIQKAQVSGQGDSLHEHIANLAGSPAIKKGILQTVKVVDELVKVMGRHKPENIVIEMARENQTTQKGQKNSRERMKRIEEGIKELGSQILKEHPVENTQLQNEKLYLYYLQNGRDMYVDQELDINRLSDYDVDHIVPQSFIKDDSIDNKVLTRSDKNRGKSNNVPSEEVVKKMKNYWRQLLNAKLITQRKFDNLTKAERGGLSELDKAGFIKRQLVETRQITKHVAQILDSRMNTKYDENDKLIREVKVITLKSKLVSDFRKDFQFYKVREINNYHHAHDAYLNAVVGTALIKKYPKLESEFVYGDYKVYDVSEQEIGKATAKYFFYSNIMNFFKTEITLANGEIRKRPLIETNGETGEIVWDKGRDFATVRKVLSMPQVNIVKKTEVQTGGFSKESILPKRNSDKLIARKKDWDPKKYGGFDSPTVAYSVLVVAKVEKGKSKKLKSVKELLGITIMERSSFEKNPIDFLEAKGYKEVRKDLIVKLPKYSLFELENGRKRMLASGELQKGNELALPSKYVNFLYLASHYEKLKGSPEDNEQKQLFVEQHKHYLDEIIEQISEFSKRVILADANLDKVLSAYNKHRDKPIREQAENIIHLFTLTNLGAPAAFKYFDTTIDRKRYTSTKEVLDATFIHQSITGLYETRIDLSQLGGD

SEQ ID NO: 19 - protein, 1359 aa, Streptococcus pyogenes
MDKKYSIGLDIGTNSVGWAVITDDYKVPSKKFKVLGNTDRHSIKKNLIGALLFDSGETAEATRLKRTARRRYTRRKNRICYLQEIFSNEMAKVDDSFFHRLEESFLVEEDKKHERHPIFGNIVDEVAYHEKYPTIYHLRKKLVDSTDKADLRLIYLALAHMIKFRGHFLIEGDLNPDNSDVDKLFIQLVQTYNQLFEENINASGVDAKAILSARLSKSRRLENLIAQLPGEKKNGLFGNLIALSLGLTPNFKSNFDLAEDAKLQLSKDTYDDDLDNLLAQIGDQYADLFLAAKNLSDAILLSDILRVNTEITKAPLSASMIKRYDEHHQDLTLLKALVRQQLPEKYKEIFFDQSKNGYAGYIDGGASQEEFYKFIKPILEKMDGTEELLVKLNREDLLRKQRTFDNGSIPHQIHLGELHAILRRQEDFYPFLKDNREKIEKILTFRIPYYVGPLARGNSRFAWMTRKSEETITPWNFEEVVDKGASAQSFIERMTNFDKNLPNEKVLPKHSLLYEYFTVYNELTKVKYVTEGMRKPAFLSGEQKKAIVDLLFKTNRKVTVKQLKEDYFKKIECFDSVEISGVEDRFNASLGTYHDLLKIIKDKDFLDNEENEDILEDIVLTLTLFEDREMIEERLKTYAHLFDDKVMKQLKRRRYTGWGRLSRKLINGIRDKQSGKTILDFLKDGFANRNFMQLIHDDSLTFKEDIQKAQVSGQGDSLHEHIANLAGSPAIKKGILQTVKVVDELVKVMGRHKPENIVIEMARENQTTQKGQKNSRERMKRIEEGIKELGSQILKEHPVENTQLQNEKLYLYYLQNGRDMYVDQELDINRLSDYDVDHIVPQSFLKDDSIDNKVLTRSDKNRGKSDNVPSEEVVKKMKNYWRQLLNAKLITQRKFDNLTKAERGGLSELDKAGFIKRQLVETRQITKHVAQILDSRMNTKYDENDKLIREVKVITLKSKLVSDFRKDFQFYKVREINNYHHAHDAYLNAVVGTALIKKYPKLESEFVYGDYKVYDVSEQEIGKATAKYFFYSNIMNFFKTEITLANGEIRKRPLIETNGETGEIVWDKGRDFATVRKVLSMPQVNIVKKTEVQTGGFSKESILPKRNSDKLIARKKDWDPKKYGGFDSPTVAYSVLVVAKVEKGKSKKLKSVKELLGITIMERSSFEKNPIDFLEAKGYKEVKKDLIIKLPKYSLFELENGRKRMLASGELQKGNELALPSKYVNFLYLASHYEKLKGSPEDNEQKQLFVEQHKHYLDEIIEQISEFSKRVILADANLDKVLSAYNKHRDKPIREQAENIIHLFTLTNLGAPAAFKYFDTTIDRKRYTSTKEVLDATLIHQSITGLYETRIDLSQLGGD

SEQ ID NO: 20 - protein, 1359 aa, Streptococcus pyogenes
MDKKYSIGLDIGTNSVGWAVITDDYKVPSKKFKVLGNTDRHSIKKNLIGALLFDSGEIAEATRLKRTARRRYTRRKNRICYLQEIFSNEMAKVDDSFFHRLEESFLVEEDKKHERHPIFGNIVDEVAYHEKYPTIYHLRKKLVDSTDKADLRLIYLALAHMIKFRGHFLIEGDLNPDNSDVDKLFIQLVQTYNQLFEENINASGVDAKAILSARLSKSRRLENLIAQLPGEKKNGLFGNLIALSLGLTPNFKSNFDLAEDAKLQLSKDTYDDDLDNLLAQIGDQYADLFLAAKNLSDAILLSDILRLNSEITKAPLSASMIKRYDEHHQDLTLLKALVRQQLPEKYKEIFFDQSKNGYAGYIDGGASQEEFYKFIKPILEKMDGTEELLAKLNREDLLRKQRTFDNGSIPHQIHLGELHAILRRQEDFYPFLKDNREKIEKILTFRIPYYVGPLARGNSRFAWMTRKSEETITPWNFEEVVDKGASAQSFIERMTNFDKNLPNEKVLPKHSLLYEYFTVYNELTKVKYVTEGMRKPAFLSGEQKKAIVDLLFKTNRKVTVKQLKEDYFKKIECFDSVEISGVEDRFNASLGTYHDLLKIIKDKDFLDNEENEDILEDIVLTLTLFEDREMIEERLKTYAHLFDDKVMKQLKRRRYTVWGRLSRKLINGIRDKQSGKTILDFLKDGFANRNFMQLIHDDSLTFKEDIQKAQVSGQGDSLHEHIANLAGSPAIKKGILQTVKVVDELVKVMGRHKPENIVIEMARENQTTQKGQKNSRERMKRIEEGIKELGSQILKEHPVENTQLQNEKLYLYYLQNGRDMYVDQELDINRLSDYDVDHIVPQSFIKDDSIDNKVLTRSDKNRGKSDNVPSEEVVKKMKNYWRQLLNAKLITQRKFDNLTKAERGGLSELDKAGFIKRQLVETRQITKHVAQILDSRMNTKYDENDKLIREVKVITLKSKLVSDFRKDFQFYKVREINNYHHAHDAYLNAVVGTALIKKYPKLESEFVYGDYKVYDVSEQEIGKATAKYFFYSNIMNFFKTEITLANGEIRKRPLIETNGETGEIVWDKGRDFATVRKVLSMPQVNIVKKTEVQTGGFSKESILPKRNSDKLIARKKDWDPKKYGGFDSPTVAYSVLVVAKVEKGKSKKLKSVKELLGITIMERSSFEKNPIDFLEAKGYKEVRKDLIIKLPKYSLFELENGRKRMLASGELQKGNELALPSKYVNFLYLASHYEKLKGSPEDNEQKQLFVEQHKHYLDEIIEQISEFSKRVILADANLDKVLSAYNKHRDKPIREQAENIIHLFTLTNLGAPTAFKYFDTTIDRKRYTSTKEVLDATFIHQSITGLYETRIDLSQLGGD

SEQ ID NO: 21 - protein, 1359 aa, Streptococcus pyogenes
MDKKYSIGLDIGTNSVGWAVITDDYKVPSKKFKVLGNTDRHSIKKNLIGALLFDSGETAEATRLKRTARRRYTRRKNRICYLQEIFSNEIAKVDDSFFHRLEESFLVEEDKKHERHPIFGNIVDEVAYHEKYPTIYHLRKKLADSTDKADLRLIYLALAHMIKFRGHFLIEGDLNPDNSDVDKLFIQLVQTYNQLFEENINASRVDAKAILSARLSKSRRLENLIAQLPGEKRNGLFGNLIALSLGLTPNFKSNFDLAEDAKLQLSKDTYDDDLDNLLAQIGDQYADLFLAAKNLSDAILLSDILRVNTEITKAPLSASMIKRYDEHHQDLTLLKALVRQQLPEKYKEIFFDQSKNGYAGYIDGGASQEEFYKFIKPILEKMDGTEELLAKLNREDLLRKQRTFDNGSIPHQIHLGELHAILRRQEDFYPFLKDNREKIEKILTFRIPYYVGPLARGNSRFAWMTRKSEETITPWNFEEVVDKGASAQSFIERMTNFDKNLPNEKVLPKHSLLYEYFTVYNELTKVKYVTEGMRKPAFLSGEQKKAIVDLLFKTNRKVTVKQLKEDYFKKIECFDSVEISGVEDRFNASLGTYHDLLKIIKDKDFLDNEENEDILEDIVLTLTLFEDREMIEERLKTYAHLFDDKVMKQLKRRRYTGWGRLSRKLINGIRDKQSGKTILDFLKDGFANRNFMQLIHDDSLTFKEDLQKAQVSGQGDSLHEHIANLAGSPAIKKGILQTVKVVDELVKVMGRHKPENIVIEMARENQTTQKGQKNSRERMKRIEEGIKELGSDILKEYPVETTQLQNEKLYLYYLQNGRDMYVDQELDINRLSDYDVDHIVPQSFLKDDSIDNKVLTRSDKNRGKSDNVPSEEVVKKMKNYWKQLLNAKLITQRKFDNLTKAERGGLSELDKAGFIKRQLVETRQITKHVAQILDSRMNTKYDENDKLIREVRVITLKSKLVSDFRKDFQFYKVREINNYHHAHDAYLNAVVGTALIKKYPKLESEFVYGDYKVYDISEQEIGKATAKYFFYSNIMNFFKTEITLANGEIRKRPLIETNGETGEIVWDKGRDFATVRKVLSMPQVNIVKKTEVQTGGFSKESILPKRNSDKLIARKKDWDPKKYGGFDSPTVAYSVLVVAKVEKGKSKKLKSVKELVGITIMERSSFEKDPVDFLEAKGYKEVRKDLIIKLPKYSLFELENGRKRMLASGELQKGNELALPSKYVNFLYLASHYEKLKGSPEDNEQKQLFVEQHKHYLDEIIEQISEFSKRVILADANLDKVLSAYNKHRDKPIREQAENIIHLFTLTNLGAPAAFKCFDTTIGRNRYKSIKEVLDATLIHQSITGLYETRIDLSQLGGD

SEQ ID NO: 22 - protein, 1358 aa, Streptococcus pyogenes
MDKKYSIGLDIGTNSVGWAVITDDYKVPSKKFKVLGNTDRHSIKKNLIGALLFGSGETAEATRLKRTARRRYTRRKNRICYLQEIFSNEMAKVDDSFFHRLEESFLVEEDKKHERHPIFGNIVDEVAYHEKYPTIYHLRKKLADSTDKADLRLIYLALAHMIKFRGHFLIEGDLNPDNSDVDKLFIQLVQIYNQLFEENINASRVDAKAILSARLSKSRRLENLIAQLPGEKRNGLFGNLIALSLGLTPNFKSNFDLAEDAKLQLSKDTYDDDLDNLLAQIGDQYADLFLAAKNLSDAILLSDILRVNSEITKAPLSASMIKRYDEHHQDLTLLKALVRQQLPEKYKEIFFDQSKNGYAGYIDGGASQEEFYKFIKPILEKMDGTEELLVKLNREDLLRKQRTFDNGSIPHQIHLGELHAILRRQEDFYPFLKDNREKIEKILTFRIPYYVGPLARGNSRFAWMTRKSEETITPWNFEEVVDKGASAQSFIERMTNFDKNLPNEKVLPKHSLLYEYFTVYNELTKVKYVTEGMRKPAFLSGEQKKAIVDLLFKTNRKVTVKQLKEDYFKKIECFDSVEISGVEDRFNASLGAYHDLLKIIKDKDFLDNEENEDILEDIVLTLTLFEDRGMIEERLKTYAHLFDDKVMKQLKRRRYTGWGRLSRKLINGIRDKQSGKTILDFLKDGFANRNFMQLIHDDSLTFKEDIQKAQVSGQGHSLHEQIANLAGSPAIKKGILQTVKIVDELVKVMGHKPENIVIEMARENQTTQKGQKNSRERMKRIEEGIKELGSQILKEHPVENTQLQNEKLYLYYLQNGRDMYVDQELDINRLSDYDVDHIVPQSFIKDDSIDNKVLTRSDKNRGKSDNVPSEEVVKKMKNYWRQLLNAKLITQRKFDNLTKAERGGLSELDKAGFIKRQLVETRQITKHVAQILDSRMNTKYDENDKLIREVKVITLKSKLVSDFRKDFQFYKVREINNYHHAHDAYLNAVVGTALIKKYPKLESEFVYGDYKVYDVSEQEIGKATAKYFFYSNIMNFFKTEITLANGEIRKRPLIETNGETGEIVWDKGRDFATVRKVLSMPQVNIVKKTEVQTGGFSKESILPKRNSDKLIARKKDWDPKKYGGFDSPTVAYSVLVVAKVEKGKSKKLKSVKELLGITIMERSSFEKNPIDFLEAKGYKEVKKDLIIKLPKYSLFELENGRKRMLASGELQKGNELALPSKYVNFLYLASHYEKLKGSPEDNEQKQLFVEQHKHYLDEIIEQISEFSKRVILADANLDKVLSAYNKHRDKPIREQAENIIHLFTLTNLGAPAAFKYFDTTIDRKRYTSTKEVLDATLIHQSITGLYETRIDLSQLGGD

SEQ ID NO: 23 - protein, 1359 aa, Streptococcus pyogenes
MDKKYSIGLDIGTNSVGWAVITDDYKVPSKKFKVLGNTDRHSIKKNLIGALLFDSGETAEATRLKRTARRRYTRRKNRICYLQEIFSNEMAKVDDSFFHRLEESFLVEEDKKHERHPIFGNIVDEVAYHEKYPTIYHLRKKLVDSTDKADLRLIYLALAHMIKFRGHFLIEGDLNPDNSDVDKLFIQLVQTYNQLFEENINASGVDAKAILSARLSKSRRLENLIAQLPGEKKNGLFGNLIALSLGLTPNFKSNFDLAEDAKLQLSKDTYDDDLDNLLAQIGDQYADLFLAAKNLSDAILLSDILRLNSEITKAPLSASMIKRYDEHHQDLTLLKALVRQQLPEKYKEIFFDQSKNGYAGYIDGGASQEEFYKFIKPILEKMDGTEELLAKLNREDLLRKQRTFDNGSIPHQIHLGELHAILRRQEDFYPFLKDNREKIEKILTFRIPYYVGPLARGNSRFAWMTRKSEETITPWNFEEVVDKGASAQSFIERMTNFDKNLPNEKVLPKHSLLYEYFTVYNELTKVKYVTEGMRKPAFLSGEQKKAIVDLLFKTNRKVTVKQLKEDYFKKIECFDSVEISGVEDRFNASLGTYHDLLKIIKDKDFLDNEENEDILEDIVLTLTLFEDREMIEERLKTYAHLFDDKVMKQLKRRRYTGWGRLSRKLINGIRDKQSGKTILDFLKDGFANRNFMQLIHDDSLTFKEDIQKAQVSGQGDSLHEHIANLAGSPAIKKGILQTVKVVDELVKVMGRHKPENIVIEMARENQTTQKGQKNSRERMKRIEEGIKELGSQILKEHPVENTQLQNEKLYLYYLQNGRDMYVDQELDINRLSDYDVDHIVPQSFIKDDSIDNKVLTRSDKNRGKSDNVPSEEVVKKMKNYWRQLLNAKLITQRKFDNLTKAERGGLSELDKAGFIKRQLVETRQITKHVAQILDSRMNTKYDENDKLIREVKVITLKSKLVSDFRKDFQFYKVREINNYHHAHDAYLNAVVGTALIKKYPKLESEFVYGDYKVYDVSEQEIGKATAKYFFYSNIMNFFKTEITLANGEIRKRPLIETNGETGEIVWDKGRDFATVRKVLSMPQVNIVKKTEVQTGGFSKESILPKRNSDKLIARKKDWDPKKYGGFDSPTVAYSVLVVAKVEKGKSKKLKSVKELLGLTIMERSSFEKNPIDFLEAKGYKEVKKDLIIKLPKYSLFELENGRKRMLASGELQKGNELALPSKYVNFLYLASHYEKLKGSPEDNEQKQLFVEQHKHYLDEIIEQISEFSKRVILADANLDKVLSAYNKHRDKPIREQAENIIHLFTLTNLGAPAAFKYFDTTIDRKRYTSTKEVLDATLIHQSITGLYETRIDLSQLGGD

SEQ ID NO: 24 - protein, 1358 aa, Streptococcus pyogenes
MDKKYSIGLDIGTNSVGWAVITDDYKVPSKKLKVLGNTDRHGIKKNLIGALLFDSGETAEATRLKRTARRRYTRRKNRICYLQEIFSNEMAKVDDSFFHRLEESFLVEEDKKHERHPIFGNIVDEVAYHEKYPTIYHLRKKLADSTDKVDLRLIYLALAHMIKFRGHFLIEGDLNPDNSDVDKLFIQLVQTYNQLFEENINASRVDAKAILSARLSKSRRLENLIAQLPGEKKNGLFGNLIALSLGLTPNFKSNFDLAEDAKLQLSKDTYDDDLDNLLAQIGDQYADLFLAAKNLSDAILLSDILRVNSEITKAPLSASMIKRYDEHHQDLTLLKALVRQQLPEKYKEIFFDQSKNGYAGYIDGGASQEEFYKFIKPILEKMDGTEELLAKLNREDLLRKQRTFDNGSIPYQIHLGELHAILRRQEDFYPFLKDNREKIEKILTFRIPYYVGPLARGNSRFAWMTRKSEETITPWNFEEVVDKGASAQSFIERMTNFDKNLPNEKVLPKHSLLYEYFTVYNELTKVKYVTEGMRKPAFLSGEQKKAIVDLLFKTNRKVTVKQLKEDYFKKIECFDSVEISGVEDRFNTSLGTYHDLLKIIKDKDFLDNEENEDILEDIVLTLTLFEDKEMIEERLKKYANLFDDKVMKQLKRRHYTGWGRLSRKLINGIRDKQSGKTILDFLKDGFANRNFMQLINDDSLTFKEAIQKAQVSGQGHSLHEQIANLAGSPAIKKGILQTVKIVDELVKVMGHKPENIVIEMARENQTTQKGQKNSRERMKRIEEGIKELGSQILKEHPVENTQLQNEKLYLYYLQNGRDMYVDQELDINRLSDYDVDHIVPQSFLKDDSIDNKVLTRSDKNRGKSDNVPSEEVVKKMKNYWRQLLNAKLITQRKFDNLTKAERGGLSELDKAGFIKRQLVETRQITKHVAQILDSRMNTKYDENDKLIREVKVITLKSKLVSDFRKDFQFYKVREINNYHHAHDAYLNAVVGTALIKKYPKLESEFVYGDYKVYDVSEQEIGKATAKYFFYSNIMNFFKTEITLANGEIRKRPLIETNGETGEIVWDKGRDFATVRKVLSMPQVNIVKKTEVQTGGFSKESILPKRNSDKLIARKKDWDPKKYGGFDSPTVAYSVLVVAKVEKGKSKKLKSVKELLGITIMERSSFEKNPIDFLEAKGYKEVRKDLIIKLPKYSLFELENGRKRMLASGELQKGNELALPSKYVNFLYLASHYEKLKGSPEDNEQKQLFVEQHKHYLDEIIEQISEFSKRVILADANLDKVLSAYNKHRDKPIREQAKNIIHLFTLTNLGAPAAFKYFDTTIERNRYKSIKEVLDATLIHQSITGLYETRIDLSQLGGD

SEQ ID NO: 25 - protein, 1358 aa, Streptococcus pyogenes
MDKKYSIGLDIGTNSVGWAVITDDYKVPSKKLKVLGNTDRHGIKKNLIGALLFDSGETAEATRLKRTARRRYTRRKNRICYLQEIFSNEMAKVDDSFFHRLEESFLVEEDKKHERHPIFGNIVDEVAYHEKYPTIYHLRKKLADSTDKVDLRLIYLALAHMIKFRGHFLIEGDLNPDNSDVDKLFIQLVQTYNQLFEENINASRVDAKAILSARLSKSRRLENLIAQLPGEKKNGLFGNLIALSLGLTPNFKSNFDLAEDAKLQLSKDTYDDDLDNLLAQIGDQYADLFLAAKNLSDAILLSDILRVNSEITKAPLSASMIKRYDEHHQDLTLLKALVRQQLPEKYKEIFFDQSKNGYAGYIDGGASQEEFYKFIKPILEKMDGTEELLAKLNREDLLRKQRTFDNGSIPYQIHLGELHAILRRQEDFYPFLKDNREKIEKILTFRIPYYVGPLARGNSRFAWMTRKSEETITPWNFEEVVDKGASAQSFIERMTNFDKNLPNEKVLPKHSLLYEYFTVYNELTKVKYVTEGMRKPAFLSGEQKKAIVDLLFKTNRKVTVKQLKEDYFKKIECFDSVEISGVEDRFNTSLGTYHDLLKIIKDKDFLDNEENEDILEDIVLTLTLFEDKEMIEERLKKYANLFDDKVMKQLKRRHYTGWGRLSRKLINGIRDKQSGKTILDFLKDGFANRNFMQLINDDSLTFKEAIQKAQVSGQGHSLHEQIANLAGSPAIKKGILQTVKIVDELVKVMGHKPENIVIEMARENQTTQKGQKNSRERMKRIEEGIKELGSQILKEHPVENTQLQNEKLYLYYLQNGRDMYVDQELDINRLSDYDVDHIVPQSFLKDDSIDNKVLTRSDKNRGKSDNVPSEEVVKKMKNYWRQLLNAKLITQRKFDNLTKAERGGLSELDKAGFIKRQLVETRQITKHVAQILDSRMNTKYDENDKLIREVKVITLKSKLVSDFRKDFQFYKVREINNYHHAHDAYLNAVVGTALIKKYPKLESEFVYGDYKVYDVSEQEIGKATAKYFFYSNIMNFFKTEITLANGEIRKRPLIETNGETGEIVWDKGRDFATVRKVLSMPQVNIVKKTEVQTGGFSKESILPKRNSDKLIARKKDWDPKKYGGFDSPTVAYSVLVVAKVEKGKSKKLKSVKELLGITIMERSSFEKNPIDFLEAKGYKEVRKDLIIKLPKYSLFELENGRKRMLASGELQKGNELALPSKYVNFLYLASHYEKLKGSPEDNEQKQLFVEQHKHYLDEIIEQISEFSKRVILADANLDKVLSAYNKHRDKPIREQAKNIIHLFTLTNLGAPAAFKYFDTTIERNRYKSIKEVLDATLIHQSITGLYEIRIDLSQLGGD

SEQ ID NO: 26 - protein, 1359 aa, Streptococcus pyogenes
MDKKYSIGLDIGTNSVGWAVITDDYKVPSKKFKVLGNTDRHSIKKNLIGALLFDSGETAEATRLKRTARRRYTRRKNRICYLQEIFSNEMAKVDDSFFHRLEESFLVEEDKKHERHPIFGNIVDEVAYHEKYPTIYHLRKKLVDSTDKADLRLIYLALAHMIKFRGHFLIEGDLNPDNSDVDKLFIQLVQTYNQLFEENINASGVDAKAILSARLSKSRRLENLIAQLPGEKKNGLFGNLIALSLGLTPNFKSNFDLAEDAKLQLSKDTYDDDLDNLLAQIGDQYADLFLAAKNLSDAILLSDILRVNTEITKASLSASMIKRYDEHHQDLTLLKALVRQQLPEKYKEIFFDQSKNGYAGYIDGGASQEEFYKFIKPILEKMDGTEELLVKLNREDLLRKQRTFDNGSIPHQIHLGELHAILRRQEDFYPFLKDNREKIEKILTFRIPYYVGPLARGNSRFAWMTRKSEETITPWNFEEVVDKGASAQSFIERMTNFDKNLPNEKVLPKHSLLYEYFTVYNELTKVKYVTEGMRKPAFLSGEQKKAIVDLLFKTNRKVTVKQLKEDYFKKIECFDSVEISGVEDRFNASLGTYHDLLKIIKDKDFLDNEENEDILEDIVLTLTLFEDREMIEERLKTYAHLFDDKVMKQLKRRRYTGWGRLSRKLINGIRDKQSGKTILDFLKDGFANRNFMQLIHDDSLTFKEDLQKAQVSGQGDSLHEHIANLAGSPAIKKGILQTVKVVDELVKVMGRHKPENIVIEMARENQTTQKGQKNSRERMKRIEEGIKELGSDILKEYPVENTQLQNEKLYLYYLQNGRDMYVDQELDINRLSDYDVDHIVPQSFIKDDSIDNKVLTRSDKNRGKSDNVPSEEVVKKMKNYWRQLLNAKLITQRKFDNLTKAERGGLSELDKAGFIKRQLVETRQITKHVAQILDSRMNTKYDENDKLIREVKVITLKSKLVSDFRKDFQFYKVREINNYHHAHDAYLNAVVGTALIKKYPKLESEFVYGDYKVYDVSEQEIGKATAKYFFYSNIMNFFKTEITLANGEIRKRPLIETNGETGEIVWDKGRDFATVRKVLSMPQVNIVKKTEVQTGGFSKESILPKRNSDKLIARKKDWDPKKYGGFDSPTVAYSVLVVAKVEKGKSKKLKSVKELLGITIMERSSFEKNPIDFLEAKGYKEVRKDLIIKLPKYSLFELENGRKRMLASGELQKGNELALPSKYVNFLYLASHYEKLKGSPEDNEQKQLFVEQHKHYLDEIIEQISEFSKRVILADANLDKVLSAYNKHRDKPIREQAENIIHLFTLTNLGAPAAFKYFDTTIGRNRYKSIKEVLDATLIHQSITGLYETRIDLSQLGGD

SEQ ID NO: 27 - protein, 1359 aa, Streptococcus pyogenes
MDKKYSIGLDIGTNSVGWAVITDDYKVPSKKFKVLGNTDRHGIKKNLIGALLFDSGETAEATRLKRTARRRYTRRKNRICYLQEIFSNEMAKVDDSFFHRLEESFLVEEDKKHERHPIFGNIVDEVAYHEKYPTIYHLRKKLADSTDKVDLRLIYLALAHMIKFRGHFLIEGDLNPDNSDVDKLFIQLVQTYNQLFEENINASRVDAKAILSARLSKSRRLENLIAQLPGEKKNGLFGNLIALSLGLTPNFKSNFDLAEDAKLQLSKDTYDDDLDNLLAQIGDQYADLFLAAKNLSDATLLSDILRVNSEITKAPLSASMIKRYDEHHQDLTLLKALVRQQLPEKYKEIFFDQSKNGYAGYIDGGASQEEFYKFIKPILEKMDGTEELLAKLNREDLLRKQRTFDNGSIPYQIHLGELHAILRRQEDFYPFLKDNREKIEKILTFRIPYYVGPLARGNSRFAWMTRKSEETITPWNFEEVVDKGASAQSFIERMTNFDKNLPNEKVLPKHSLLYEYFTVYNELTKVKYVTEGMRKPAFLSGEQKKAIVDLLFKTNRKVTVKQLKEDYFKKIECFDSVEISGVEDRFNASLGTYHDLLKIIKDKDFLDNEENEDILEDIVLTLTLFEDREMIEERLKTYAHLFDDKVMKQLKRRRYTGWGRLSRKLINGIRDKQSGKTILDFLKDGFANRNFMQLIHDDSLTFKEDIQKAQVSGQGDSLHEHIANLAGSPAIKKGILQTVKVVDELVKVMGRHKPENIVIEMARENQTTQKGQKNSRERMKRIEEGIKELGSDILKEYPVENTQLQNEKLYLYYLQNGRDMYVDQELDINRLSDYDVDHIVPQSFLKDDSIDNKVLTRSDKNRGKSDNVPSEEVVKKMKNYWRQLLNAKLITQRKFDNLTKAERGGLSELDKAGFIKRQLVETRQITKHVAQILDSRMNTKYDENDKLIREVKVITLKSKLVSDFRKDFQFYKVREINNYHHAHDAYLNAVVGTALIKKYPKLESEFVYGDYKVYDVSEQEIGKATAKYFFYSNIMNFFKTEITLANGEIRKRPLIETNGETGEIVWDKGRDFATVRKVLSMPQVNIVKKTEVQTGGFSKESILPKRNSDKLIARKKDWDPKKYGGFDSPTVAYSVLVVAKVEKGKSKKLKSVKELLGITIMERSSFEKNPIDFLEAKGYKEVRKDLIIKLPKYSLFELENGRKRMLASGELQKGNELALPSKYVNFLYLASHYEKLKGSPEDNEQKQLFVEQHKHYLDEIIEQISEFSKRVILADANLDKVLSAYNKHRDKPIREQAENIIHLFTLTNLGAPAAFKYFDTTIDRKRYTSTKEVLDATLIHQSITGLYETRIDLSQLGGD

SEQ ID NO: 28 - protein, 1359 aa, Streptococcus pyogenes
MDKKYSIGLDIGTNSVGWAVITDDYKVPSKKFKVLGNTDRHSIKKNLIGALLFDSGETAEATRLKRTARRRYTRRKNRICYLQEIFSNEMAKVDDSFFHRLEESFLVEEDKKHERHPIFGNIVDEVAYHEKYPTIYHLRKKLADSTDKADLRLIYLALAHMIKFRGHFLIEGDLNPDNSDVDKLFIQLVQTYNQLFEENINASRVDAKAILSARLSKSRRLENLIAQLPGEKRNGLFGNLIALSLGLTPNFKSNFDLAEDAKLQLSKDTYDDDLDNLLAQIGDQYADLFLAAKNLSDAILLSDILRVNSEITKAPLSASMIKRYDEHHQDLTLLKALVRQQLPEKYKEIFFDQSKNGYAGYIDGGASQEEFYKFIKPILEKMDGTEELLAKLNREDLLRKQRTFDNGSIPHQIHLGELHAILRRQEDFYPFLKDNREKIEKILTFRIPYYVGPLARGNSRFAWMTRKSEETITPWNFEEVVDKGASAQSFIERMTNFDKNLPNEKVLPKHSLLYEYFTVYNELTKVKYVTEGMRKPEFLSGEQKKAIVDLLFKTNRKVTVKQLKEDYFKKIECFDSVEISGVEDRFNASLGTYHDLLKIIKDKDFLDNEENEDILEDIVLTLTLFEDREMIEERLKTYAHLFDDKVMKQLKRRRYTGWGRLSRKLINGIRDKQSGKTILDFLKDGFANRNFMQLIHDDSLTFKEDIQKAQVSGQGDSLHEHIANLAGSPAIKKGILQTVKVVDELVKVMGRHKPENIVIEMARENQTTQKGQKNSRERMKRIEEGIKELGSDILKEYPVENTQLQNEKLYLYYLQNGRDMYVDQELDINRLSDYDVDHIVPQSFIKDDSIDNKVLTRSDKNRGKSDNVPSEEVVKKMKNYWKQLLNAKLITQRKFDNLTKAERGGLSELDKAGFIKRQLVETRQITKHVAQILDSRMNTKYDENDKLIREVKVITLKSKLVSDFRKDFQFYKVREINNYHHAHDAYLNAVVGTALIKKYPKLESEFVYGDYKVYDVSEQEIGKATAKYFFYSNIMNFFKTEITLANGEIRKRPLIETNGETGEIVWDKGRDFATVRKVLSMPQVNIVKKTEVQTGGFSKESILPKRNSDKLIARKKDWDPKKYGGFDSPTVAYSVLVVAKVEKGKSKKLKSVKELLGITIMERSSFEKNPIDFLEAKGYKEVRKDLIIKLPKYSLFELENGRKRMLASGELQKGNELALPSKYVNFLYLASHYEKLKGSPEDNEQKQLFVEQHKHYLDEIIEQISEFSKRVILADANLDKVLSAYNKHRDKPIREQAENIIHLFTLTNFGAPAAFIYFDTTIGRNRYKSIKEVLDATLIHQSITGLYETRIDLSQLGGD

SEQ ID NO: 29 - protein, 1359 aa, Streptococcus pyogenes
MDKKYSIGLDIGTNSVGWAVITDDYKVPSKKFKVLGNTDRHSIKKNLIGALLFDSGETAEATRLKRTARRRYTRRKNRICYLQEIFSNEIAKVDDSFFHRLEESFLVEEDKKHERHPIFGNIVDEVAYHEKYPTIYHLRKKLADSTDKADLRLIYLALAHMIKFRGHFLIEGDLNPDNSDVDKLFIQLVQTYNQLFEENINASRVDAKAILSARLSKSRRLENLIAQLPGEKRNGLFGNLIALSLGLTPNFKSNFDLAEDAKLQLSKDTYDDDLDNLLAQIGDQYADLFLAAKNLSDAILLSDILRVNTEITKAPLSASMIKRYDEHHQDLTLLKALVRQQLPEKYKEIFFDQSKNGYAGYIDGGASQEEFYKFIKPILEKMDGTEELLAKLNREDLLRKQRTFDNGSIPHQIHLGELHAILRRQEDFYPFLKDNREKIEKILTFRIPYYVGPLARGNSRFAWMTRKSEETITPWNFEEVVDKGASAQSFIERMTNFDKNLPNEKVLPKHSLLYEYFTVYNELTKVKYVTEGMRKPAFLSGEQKKAIVDLLFKTNRKVTVKQLKEDYFKKIECFDSVEISGVEDRFNASLGTYHDLLKIIKDKDFLDNEENEDILEDIVLTLTLFEDREMIEERLKTYAHLFDDKVMKQLKRRRYTGWGRLSRKLINGIRDKQSGKTILDFLKDGFANRNFMQLIHDDSLTFKEDLQKAQVSGQGDSLHEHIANLAGSPAIKKGILQTVKVVDELVKVMGRHKPENIVIEMARENQTTQKGQKNSRERMKRIEEGIKELGSDILKEYPVENTQLQNEKLYLYYLQNGRDMYVDQELDINRLSDYDVDHIVPQSFLKDDSIDNKVLTRSDKNRGKSDNVPSEEVVKKMKNYWKQLLNAKLITQRKFDNLTKAERGGLSELDKAGFIKRQLVETRQITKHVAQILDSRMNTKYDENDKLIREVRVITLKSKLVSDFRKDFQFYKVREINNYHHAHDAYLNAVVGTALIKKYPKLESEFVYGDYKVYDISEQEIGKATAKYFFYSNIMNFFKTEITLANGEIRKRPLIETNGETGEIVWDKGRDFATVRKVLSMPQVNIVKKTEVQTGGFSKESILPKRNSDKLIARKKDWDPKKYGGFDSPTVAYSVLVVAKVEKGKSKKLKSVKELVGITIMERSSFEKDPVDFLEAKGYKEVRKDLIIKLPKYSLFELENGRKRMLASGELQKGNELALPSKYVNFLYLASHYEKLKGSPEDNEQKQLFVEQHKHYLDEIIEQISEFSKRVILADANLDKVLSAYNKHRDKPIREQAENIIHLFTLTNLGAPAAFKYFDTTIGRNRYKSIKEVLDATLIHQSITGLYETRIDLSQLGGD

SEQ ID NO: 30 - protein, 1359 aa, Streptococcus pyogenes
MDKKYSIGLDIGTNSVGWAVITDDYKVPSKKFKVLGNTDRHSIKKNLIGALLFDSGETAEATRLKRTARRRYTRRKNRICYLQEIFSNEIAKVDDSFFHRLEESFLVEEDKKHERHPIFGNIVDEVAYHEKYPTIYHLRKKLADSTDKADLRLIYLALAHMIKFRGHFLIEGGLNPDNSDVDKLFIQLVQTYNQLFEENINASRVDAKAILSARLSKSRRLENLIAQLPGEKRNGLFGNLIALSLGLTPNFKSNFDLAEDAKLQLSKDTYDDDLDNLLAQIGDQYADLFLAAKNLSDAILLSDILRVNTEITKAPLSASMIKRYDEHHQDLTLLKALVRQQLPEKYKEIFFDQSKNGYAGYIDGGASQEEFYKFIKPILEKMDGTEELLAKLNREDLLRKQRTFDNGSIPHQIHLGELHAILRRQEDFYPFLKDNREKIEKILTFRIPYYVGPLARGNSRFAWMTRKSEETITPWNFEEVVDKGASAQSFIERMTNFDKNLPNEKVLPKHSLLYEYFTVYNELTKVKYVTEGMRKPAFLSGEQKKAIVDLLFKTNRKVTVKQLKEDYFKKIECFDSVEISGVEDRFNASLGTYHDLLKIIKDKDFLDNEENEDILEDIVLTLTLFEDREMIEERLKTYAHLFDDKVMKQLKRRRYTGWGRLSRKLINGIRDKQSGKTILDFLKDGFANRNFMQLIHDDSLTFKEDLQKAQVSGQGDSLHEHIANLAGSPAIKKGILQTVKVVDELVKVMGRHKPENIVIEMARENQTTQKGQKNSRERMKRIEEGIKELGSDILKEYPVENTQLQNEKLYLYYLQNGRDMYVDQELDINRLSDYDVDHIVPQSFLKDDSIDNKVLTRSDKNRGKSDNVPSEEVVKKMKNYWKQLLNAKLITQRKFDNLTKAERGGLSELDKAGFIKRQLVETRQITKHVAQILDSRMNTKYDENDKLIREVRVITLKSKLVSDFRKDFQFYKVREINNYHHAHDAYLNAVVGTALIKKYPKLESEFVYGDYKVYDISEQEIGKATAKYFFYSNIMNFFKTEITLANGEIRKRPLIETNGETGEIVWDKGRDFATVRKVLSMPQVNIVKKTEVQTGGFSKESILPKRNSDKLIARKKDWDPKKYGGFDSPTVAYSVLVVAKVEKGKSKKLKSVKELVGITIMERSSFEKDPVDFLEAKGYKEVRKDLIIKLPKYSLFELENGRKRMLASGELQKGNELALPSKYVNFLYLASHYEKLKGSPEDNEQKQLFVEQHKHYLDEIIEQISEFSKRVILADANLDKVLSAYNKHRDKPIREQAENIIHLFTLTNLGAPAAFKYFDTTIGRNRYKSIKEVLDATLIHQSITGLYETRIDLSQLGGD

SEQ ID NO: 31 - protein, 1359 aa, Streptococcus pyogenes
MDKKYSIGLDIGTNSVGWAVITDDYKVPSKKFKVLGNTDRHSIKKNLIGALLFDSGETAEATRLKRTARRRYTRRKNRICYLQEIFSNEMAKVDDSFFHRLEESFLVEEDKKHERHPIFGNIVDEVAYHEKYPTIYHLRKKLVDSTDKADLRLIYLALAHMIKFRGHFLIEGDLNPDNSDVDKLFIQLVQTYNQLFEENINANGVDAKAILSARLSKSRRLENLIAQLPGEKKNGLFGNLIALSLGLTPNFKSNFDLAEDAKLQLSKDTYDDDLDNLLAQIGDQYADLFLAAKNLSDAILLSDILRVNTEITKAPLSASMIKRYDEHHQDLTLLKALVRQQLPEKYKEIFFDQSKNGYAGYIDGGASQEEFYKFIKPILEKMDGTEELLVKLNREDLLRKQRTFDNGSIPHQIHLGELHAILRRQEDFYPFLKDNREKIEKILTFRIPYYVGPLARGNSRFAWMTRKSEETITPWNFEEVVDKGASAQSFIERMTNFDKNLPNEKVLPKHSLLYEYFTVYNELTKVKYVTEGMRKPAFLSGEQKKAIVDLLFKTNRKVTVKQLKEDYFKKIECFDSVEISGVEDRFNASLGTYHDLLKIIKDKDFLDNEENEDILEDIVLTLTLFEDREMIEERLKTYAHLFDDKVMKQLKRRRYTGWGRLSRKLINGIRDKQSGKTILDFLKDGFANRNFMQLIHDDSLTFKEDIQKAQVSGQGDSLHEHIANLAGSPAIKKGILQTVKVVDELVKVMGRHKPENIVIEMARENQTTQKGQKNSRERMKRIEEGIKELGSQILKEHPVENTQLQNEKLYLYYLQNGRDMYVDQELDINRLSDYDVDHIVPQSFLKDDSIDNKVLTRSDKNRGKSDNVPSEEVVKKMKNYWRQLLNAKLITQRKFDNLTKAERGGLSELDKAGFIKRQLVETRQITKHVAQILDSRMNTKYDENDKLIREVKVITLKSKLVSDFRKDFQFYKVREINNYHHAHDAYLNAVVGTALIKKYPKLESEFVYGDYKVYDVSEQEIGKATAKYFFYSNIMNFFKTEITLANGEIRKRPLIETNGETGEIVWDKGRDFATVRKVLSMPQVNIVKKTEVQTGGFSKESILPKRNSDKLIARKKDWDPKKYGGFDSPTVAYSVLVVAKVEKGKSKKLKSVKELLGITIMERSSFEKNPIDFLEAKGYKEVKKDLIIKLPKYSLFELENGRKRMLASGELQKGNELALPSKYVNFLYLASHYEKLKGSPEDNEQKQLFVEQHKHYLDEIIEQISEFSKRVILADANLDKVLSAYNKHRDKPIREQAENIIHLFTLTNLGAPAAFKYFDTTIDRKRYTSTKEVLDATLIHQSITGLYETRIDLSQLGGD

SEQ ID NO: 32 - protein, 1359 aa, Streptococcus pyogenes
MDKKYSIGLDIGTNSVGWAVITDDYKVPSKKFKVLGNTDRHSIKKNLIGALLFDSGETAEATRLKRTARRRYTRRKNRICYLQEIFSNEMAKVDDSFFHRLEESFLVEEDKKHERHPIFGNIVDEVAYHEKYPTIYHLRKKLADSTDKADLRLIYLALAHMIKFRGHFLIEGDLNPDNSDVDKLFIQLVQTYNQLFEENINASRVDAKAILSARLSKSRRLENLIAQLPGEKKNGLFGNLIALLLGLTPNFKSNFDLAEDAKLQLSKDTYDDDLDNLLAQIGDQYADLFLAAKNLSDAILLSDILRVNSEITKAPLSASMIKRYDEHHQDLTLLKALVRQQLPEKYKEIFFDQSKNGYAGYIDGGASQEEFYKFIKPILEKMDGTEELLAKLNREDLLRKQRTFDNGSIPHQIHLGELHAILRRQEDFYPFLKDNREKIEKILTFRIPYYVGPLARGNSRFAWMTRKSEETITPWNFEEVVDKGASAQSFIERMTNFDKNLPNEKVLPKHSLLYEYFTVYNELTKVKYVTEGMRKPAFLSGEQKKAIVDLLFKTNRKVTVKQLKEDYFKKIECFDSVEISGVEDRFNASLGTYHDLLKIIKDKDFLDNEENEDILEDIVLTLTLFEDKEMIEERLKKYAHLFDDKVMKQLKRRRYTGWGRLSRKLINGIRDKQSGKTILDFLKDGFANRNFMQLIHDDSLTFKEDIQKAQVSGQGDSLHEHIANLAGSPAIKKGILQTVKVVDELVKVMGRHKPENIVIEMARENQTTQKGQKNSRERMKRIEEGIKELGSDILKEYPVENTQLQNEKLYLYYLQNGRDMYVDQELDINRLSDYDVDHIVPQSFLKDDSIDNKVLTRSDKNRGKSDNVPSEEVVKKMKNYWKQLLNAKLITQRKFDNLTKAERGGLSELDKAGFIKRQLVETRQITKHVAQILDSRMNTKYDENDKLIREVRVITLKSKLVSDFRKDFQFYKVREINNYHHAHDAYLNAVVGTALIKKYPKLESEFVYGDYKVYDVSEQEIGKATAKYFFYSNIMNFFKTEITLANGEIRKRPLIETNGETGEIVWDKGRDFATVRKVLSMPQVNIVKKTEVQTGGFSKESILPKRNSDKLIARKKDWDPKKYGGFDSPTVAYSVLVVAKVEKGKSKKLKSVKELLGITIMERSSFEKNPIDFLEAKGYKEVRKDLIIKLPKYSLFELENGRKRMLASGELQKGNELALPSKYVNFLYLASHYEKLKGSPEDNEQKQLFVEQHKHYLDEIIEQISEFSKRVILADANLDKVLSAYNKHRDKPIREQAENIIHLFTLTNLGAPAAFKYFDTTIDRKRYTSTKEVLDATLIHQSITGLYETRIDLSQLGGD

SEQ ID NO: 33 - protein, 1359 aa, Streptococcus pyogenes
MDKKYSIGLDIGTNSVGWAVITDDYKVPSKKFKVLGNTDRHSIKKNLIGALLFDSGEIAEATRLKRTARRRYTRRKNRICYLQEIFSNEMAKVDDSFFHRLEESFLVEEDKKHERHPIFGNIVDEVAYHEKYPTIYHLRKKLVDSTDKADLRLIYLALAHMIKFRGHFLIEGDLNPDNSDVDKLFIQLVQTYNQLFEENINASGVDAKAILSARLSKSRRLENLIAQLPGEKKNGLFGNLIALSLGLTPNFKSNFDLAEDAKLQLSKDTYDDDLDNLLAQIGDQYADLFLAAKNLSDAILLSDILRLNSEITKAPLSASMIKRYDEHHQDLTLLKALVRQQLPEKYKEIFFDQSKNGYAGYIDGGASQEEFYKFIKPILEKMDGTEELLAKLNRKDLLRKQRTFDNGSIPHQIHLGELHAILRRQEDFYPFLKDNREKIEKILTFRIPYYVGPLARGNSRFAWMTRKSEETITPWNFEEVVDKGASAQSFIERMTNFDKNLPNEKVLPKHSLLYEYFTVYNELTKVKYVTEGMRKPAFLSGEQKKAIVDLLFKTNRKVTVKQLKEDYFKKIECFDSVEISGVEDRFNASLGTYHDLLKIIKDKDFLDNEENEDILEDIVLTLTLFEDREMIEERLKTYAHLFDDKVMKQLKRRRYTGWGRLSRKLINGIRDKQSGKTILDFLKDGFANRNFMQLIHDDSLTFKEDIQKAQVSGQGDSLHEHIANLAGSPAIKKGILQTVKVVDELVKVMGRHKPENIVIEMARENQTTQKGQKNSRERMKRIEEGIKELGSQILKEHPVENTQLQNEKLYLYYLQNGRDMYVDQELDINRLSDYDVDHIVPQSFIKDDSIDNKVLTRSDKNRGKSDNVPSEEVVKKMKNYWRQLLNAKLITQRKFDNLTKAERGGLSELDKAGFIKRQLVETRQITKHVAQILDSRMNTKYDENDKLIREVKVITLKSKLVSDFRKDFQFYKVREINNYHHAHDAYLNAVVGTALIKKYPKLESEFVYGDYKVYDVSEQEIGKATAKYFFYSNIMNFFKTEITLANGEIRKRPLIETNGETGEIVWDKGRDFATVRKVLSMPQVNIVKKTEVQTGGFSKESILPKRNSDKLIARKKDWDPKKYGGFDSPTVAYSVLVVAKVEKGKSKKLKSVKELLGITIMERSSFEKNPIDFLEAKGYKEVRKDLIIKLPKYSLFELENGRKRMLASGELQKGNELALPSKYVNFLYLASHYEKLKGSPEDNEQKQLFVEQHKHYLDEIIEQISEFSKRVILADANLDKVLSAYNKHRDKPIREQAENIIHLFTLTNLGAPTAFKYFDTTIDRKRYTSTKEVLDATFIHQSITGLYETRIDLSQLGGD

SEQ ID NO: 34 - protein, 1184 aa, Streptococcus pyogenes
PDNSDVDKLFIQLVQTYNQLFEENINASGVDAKAILSARLSKSRRLENLIAQLPGEKKNGLFGNLIALSLGLTPNFKSNFDLAEDAKLQLSKDTYDDDLDNLLAQIGDQYADLFLAAKNLSDAILLSDILRVNTEITKAPLSASMIKRYDEHHQDLTLLKALVRQQLPEKYKEIFFDQSKNGYAGYIDGGASQEEFYKFIKPILEKMDGTEELLVKLNREDLLRKQRTFDNGSIPHQIHLGELHAILRRQEDFYPFLKDNREKIEKILTFRIPYYVGPLARGNSRFAWMTRKSEETITPWNFEEVVDKGASAQSFIERMTNFDKNLPNEKVLPKHSLLYEYFTVYNELTKVKYVTEGMRKPAFLSGEQKKAIVDLLFKTNRKVTVKQLKEDYFKKIECFDSVEISGVEDRFNASLGTYHDLLKIIKDKDFLDNEENEDILEDIVLTLTLFEDREMIEERLKTYAHLFDDKVMKQLKRRRYTGWGRLSRKLINGIRDKQSGKTILDFLKDGFANRNFMQLIHDDSLTFKEDIQKAQVSGQGDSLHEHIANLAGSPAIKKGILQTVKVVDELVKVMGRHKPENIVIEMARENQTTQKGQKNSRERMKRIEEGIKELGSQILKEHPVENTQLQNEKLYLYYLQNGRDMYVDQELDINRLSDYDVDHIVPQSFLKDDSIDNKVLTRSDKNRGKSDNVPSEEVVKKMKNYWRQLLNAKLITQRKFDNLTKAERGGLSELDKAGFIKRQLVETRQITKHVAQILDSRMNTKYDENDKLIREVKVITLKSKLVSDFRKDFQFYKVREINNYHHAHDAYLNAVVGTALIKKYPKLESEFVYGDYKVYDVSEQEIGKATAKYFFYSNIMNFFKTEITLANGEIRKRPLIETNGETGEIVWDKGRDFATVRKVLSMPQVNIVKKTEVQTGGFSKESILPKRNSDKLIARKKDWDPKKYGGFDSPTVAYSVLVVAKVEKGKSKKLKSVKELLGITIMERSSFEKNPIDFLEAKGYKEVKKDLIIKLPKYSLFELENGRKRMLASGELQKGNELALPSKYVNFLYLASHYEKLKGSPEDNEQKQLFVEQHKHYLDEIIEQISEFSKRVILADANLDKVLSAYNKHRDKPIREQAENIIHLFTLTNLGAPAAFKYFDTTIDRKRYTSTKEVLDATLIHQSITGLYETRIDLSQLGGD

SEQ ID NO: 35 - protein, 1359 aa, Streptococcus pyogenes
MDKKYSIGLDIGTNSVGWAVITDDYKVPSKKFKVLGNTDRHSIKKNLIGALLFDSGETAEATRLKRTARRRYTRRKNRICYLQEIFSNEMAKVDDSFFHRLEESFLVEEDKKHERHPIFGNIVDEVAYHEKYPTIYHLRKKLADSTDKADLRLIYLALAHMIKFRGHFLIEGDLNPDNSDVDKLFIQLVQTYNQLFEENINASRVDAKAILSARLSKSRRLENLIAQLPGEKKNGLFGNLIALSLGLTPNFKSNFDLAEDAKLQLSKDTYDDDLDNLLAQIGDQYADLFLAAKNLSDATLLSDILRVNSEITKAPLSASMIKRYDEHHQDLTLLKALVRQQLPEKYKEIFFDQSKNGYAGYIDGGASQEEFYKFIKPILEKMDGTEELLAKLNREDLLRKQRTFDNGSIPHQIHLGELHAILRRQEDFYPFLKDNREKIEKILTFRIPYYVGPLARGNSRFAWMTRKSEETITPWNFEEVVDKGASAQSFIERMTNFDKNLPNEKVLPKHSLLYEYFTVYNELTKVKYVTEGMRKPAFLSGEQKKAIVDLLFKTNRKVTVKQLKEDYFKKIECFDSVEISGVEDRFNASLGTYHDLLKIIKDKDFLDNEENEDILEDIVLTLTLFEDREMIEERLKTYAHLFDDKVMKQLKRRRYTGWGRLSRKLINGIRDKQSGKTILDFLKDGFANRNFMQLIHDDSLTFKEDIQKAQVSGQGDSLHEHIANLAGSPAIKKGILQTVKVVDELVKVMGRHKPENIVIEMARENQTTQKGQKNSRERMKRIEEGIKELGSDILKEYPVENTQLQNEKLYLYYLQNGRDMYVDQELDINRLSDYDVDHIVPQSFLKDDSIDNKVLTRSDKNRGKSDNVPSEEVVKKMKNYWRQLLNAKLITQRKFDNLTKAERGGLSELDKAGFIKRQLVETRQITKHVAQILDSRMNTKYDENDKLIREVKVITLKSKLVSDFRKDFQFYKVREINNYHHAHDAYLNAVVGTALIKKYPKLESEFVYGDYKVYDVSEQEIGKATAKYFFYSNIMNFFKTEITLANGEIRKRPLIETNGETGEIVWDKGRDFATVRKVLSMPQVNIVKKTEVQTGGFSKESILPKRNSDKLIARKKDWDPKKYGGFDSPTVAYSVLVVAKVEKGKSKKLKSVKELLGITIMERSSFEKNPIDFLEAKGYKEVRKDLIIKLPKYSLFELENGRKRMLASGELQKGNELALPSKYVNFLYLASHYEKLKGSPEDNEQKQLFVEQHKHYLDEIIEQISEFSKRVILADANLDKVLSAYNKHRDKPIREQAENIIHLFTLTNLGAPAAFKYFDTTIDRKRYTSTKEVLDATLIHQSITGLYETRIDLSQLGGD

SEQ ID NO: 36 - protein, 1358 aa, Streptococcus pyogenes
MDKKYSIGLDIGTNSVGWAVITDDYKVPSKKFKVLGNTDRHSIKKNLIGALLFDSGETAEATRLKRTARRRYTRRKNRICYLQEIFSNEMAKVDDSFFHRLEESFLVEEDKKHERHPIFGNIVDEVAYHEKYPTIYHLRKKLADSTDKVDLRLIYLALAHMIKFRGHFLIEGDLNPDNSDVDKLFIQLVQTYNQLFEENINASRVDAKAILSARLSKSRRLENLIAQLPGEKKNGLFGNLIALSLGLTPNFKSNFDLAEDTKLQLSKDTYDDDLDNLLAQIGDQYADLFLAAKNLSDAILLSDILRVNSEITKAPLSASMIKRYDEHHQDLTLLKALVRQQLPEKYKEIFFDQSKNGYAGYIDGGASQEEFYKFIKPILEKMDGTEELLAKLNREDLLRKQRTFDNGSIPYQIHLGELHAILRRQEDFYPFLKDNREKIEKILTFRIPYYVGPLARGNSRFAWMTRKSEETITPWNFEEVVDKGASAQSFIERMTNFDKNLPNEKVLPKHSLLYEYFTVYNELTKVKYVTEGMRKPAFLSGEQKKAIVDLLFKTNRKVTVKQLKEDYFKKIECFDSVEISGVEDRFNTSLGTYHDLLKIIKDKDFLDNEENEDILEDIVLTLTLFEDKEMIEERLKKYANLFDDKVMKQLKRRHYTGWGRLSRKLINGIRDKQSGKTILDFLKDGFANRNFMQLINDDSLTFKEAIQKAQVSGQGHSLHEQIANLAGSPAIKKGILQTVKIVDELVKVMGHKPENIVIEMARENQTTQKGQKNSRERMKRIEEGIKELGSQILKEHPVENTQLQNEKLYLYYLQNGRDMYVDQELDINRLSDYDVDHIVPQSFLKDDSIDNKVLTRSDKNRGKSDNVPSEEVVKKMKNYWRQLLNAKLITQRKFDNLTKAERGGLSELDKAGFIKRQLVETRQITKHVAQILDSRMNTKYDENDKLIREVKVITLKSKLVSDFRKDFQFYKVREINNYHHAHDAYLNAVVGTALIKKYPKLESEFVYGDYKVYDVSEQEIGKATAKYFFYSNIMNFFKTEITLANGEIRKRPLIETNGETGEIVWDKGRDFATVRKVLSMPQVNIVKKTEVQTGGFSKESILPKRNSDKLIARKKDWDPKKYGGFDSPTVAYSVLVVAKVEKGKSKKLKSVKELLGITIMERSSFEKNPIDFLEAKGYKEVRKDLIIKLPKYSLFELENGRKRMLASGELQKGNELALPSKYVNFLYLASHYEKLKGSPEDNEQKQLFVEQHKHYLDEIIEQISEFSKRVILADANLDKVLSAYNKHRDKPIREQAKNIIHLFTLTNLGAPAAFKYFDTTIERNRYKSIKEVLDATLIHQSITGLYETRIDLSQLGGD

SEQ ID NO: 37 - protein, 1359 aa, Streptococcus pyogenes
MDKKYSIGLDIGTNSVGWAVITDDYKVPSKKFKVLGNTDRHSIKKNLIGALLFDSGETAEATRLKRTARRRYTRRKNRICYLQEIFSNEMAKVDDSFFHRLEESFLVEEDKKHERHPIFGNIVDEVAYHEKYPTIYHLRKKLADSTDKADLRLIYLALAHMIKFRGHFLIEGDLNPDNSDVDKLFIQLVQTYNQLFEENINASRVDAKAILSARLSKSRRLENLIAQLPGEKRNGLFGNLIALSLGLTPNFKSNFDLAEDAKLQLSKDTYDDDLDNLLAQIGDQYADLFLAAKNLSDAILLSDILRVNSEITKAPLSASMIKRYDEHHQDLTLLKALVRQQLPEKYKEIFFDQSKNGYAGYIDGGASQEEFYKFIKPILEKMDGTEELLAKLNREDLLRKQRTFDNGSIPHQIHLGELHAILRRQEDFYPFLKDNREKIEKILTFRIPYYVGPLARGNSRFAWMTRKSEETITPWNFEEVVDKGASAQSFIERMTNFDKNLPNEKVLPKHSLLYEYFTVYNELTKVKYVTEGMRKPAFLSGEQKKAIVDLLFKTNRKVTVKQLKEDYFKKIECFDSVEISGVEDRFNASLGTYHDLLKIIKDKDFLDNEENEDILEDIVLTLTLFEDREMIEERLKTYAHLFDDKVMKQLKRRRYTGWGRLSRKLINGIRDKQSGKTILDFLKDGFANRNFMQLIHDDSLTFKEDIQKAQVSGQGDSLHEHIANLAGSPAIKKGILQTVKIVDELVKVMGRHKPENIVIEMARENQTTQKGQKNSRERMKRIEEGIKELGSDILKEYPVENTQLQNEKLYLYYLQNGRDMYVDQELDINRLSDYDVDHIVPQSFLKDDSIDNKVLTRSDKNRGKSDNVPSEEVVKKMKNYWKQLLNAKLITQRKFDNLTKAERGGLSELDKAGFIKRQLVETRQITKHVAQILDSRMNTKYDENDKLIREVKVITLKSKLVSDFRKDFQFYKVREINNYHHAHDAYLNAVVGTALIKKYPKLESEFVYGDYKVYDVSEQEIGKATAKYFFYSNIMNFFKTEITLANGEIRKRPLIETNGETGEIVWDKGRDFATVRKVLSMPQVNIVKKTEVQTGGFSKESILPKRNSDKLIARKKDWDPKKYGGFDSPTVAYSVLVVAKVEKGKSKKLKSVKELLGITIMERSSFEKNPIDFLEAKGYKEVRKDLIIKLPKYSLFELENGRKRMLASGELQKGNELALPSKYVNFLYLASHYEKLKGSPEDNEQKQLFVEQHKHYLDEIIEQISEFSKRVILADANLDKVLSAYNKHRDKPIREQAENIIHLFTLTNLGAPAAFKYFDTTIGRNRYKSIKEVLDATLIHQSITGLYETRIDLSQLGGD

SEQ ID NO: 38 - protein, 1270 aa, Streptococcus pyogenes
MAKVDDSFFHRLEESFLVEEDKKHERHPIFGNIVDEVAYHEKYPTIYHLRKKLVDSTDKADLRLIYLALAHMIKFRGHFLIEGDLNPDNSDVDKLFIQLVQTYNQLFEENINASGVDAKAILSARLSKSRRLENLIAQLPGEKKNGLFGNLIALSLGLTPNFKSNFDLAEDAKLQLSKDTYDDDLDNLLAQIGDQYADLFLAAKNLSDAILLSDILRVNTEITKAPLSASMIKRYDEHHQDLTLLKALVRQQLPEKYKEIFFDQSKNGYAGYIDGGASQEEFYKFIKPILEKMDGTEELLVKLNREDLLRKQRTFDNGSIPHQIHLGELHAILRRQEDFYPFLKDNREKIEKILTFRIPYYVGPLARGNSRFAWMTRKSEETITPWNFEEVVDKGASAQSFIERMTNFDKNLPNEKVLPKHSLLYEYFTVYNELTKVKYVTEGMRKPAFLSGEQKKAIVDLLFKTNRKVTVKQLKEDYFKKIECFDSVEISGVEDRFNASLGTYHDLLKIIKDKDFLDNEENEDILEDIVLTLTLFEDREMIEERLKTYAHLFDDKVMKQLKRRRYTGWGRLSRKLINGIRDKQSGKTILDFLKDGFANRNFMQLIHDDSLTFKEDIQKAQVSGQGDSLHEHIANLAGSPAIKKGILQTVKVVDELVKVMGRHKPENIVIEMARENQTTQKGQKNSRERMKRIEEGIKELGSQILKEHPVENTQLQNEKLYLYYLQNGRDMYVDQELDINRLSDYDVDHIVPQSFLKDDSIDNKVLTRSDKNRGKSDNVPSEEVVKKMKNYWRQLLNAKLITQRKFDNLTKAERGGLSELDKAGFIKRQLVETRQITKHVAQILDSRMNTKYDENDKLIREVKVITLKSKLVSDFRKDFQFYKVREINNYHHAHDAYLNAVVGTALIKKYPKLESEFVYGDYKVYDVSEQEIGKATAKYFFYSNIMNFFKTEITLANGEIRKRPLIETNGETGEIVWDKGRDFATVRKVLSMPQVNIVKKTEVQTGGFSKESILPKRNSDKLIARKKDWDPKKYGGFDSPTVAYSVLVVAKVEKGKSKKLKSVKELLGITIMERSSFEKNPIDFLEAKGYKEVKKDLIIKLPKYSLFELENGRKRMLASGELQKGNELALPSKYVNFLYLASHYEKLKGSPEDNEQKQLFVEQHKHYLDEIIEQISEFSKRVILADANLDKVLSAYNKHRDKPIREQAENIIHLFTLTNLGAPAAFKYFDTTIDRKRYTSTKEVLDATLIHQSITGLYETRIDLSQLGGD

SEQ ID NO: 39 - protein, 536 aa, Streptococcus pyogenes
QELDINRLSGYDVDHIVPQSFLKDDSIDNKVLTRSDKNRGKSDNVPSEEVVKKMKNYWRQLLNAKLITQRKFDNLTKAERGGLSELDKVGFIKRQLVETRQITKHVAQILDSRMNTKYDENDKLIREVRVITLKSKLVSDFRKDFQFYKVREINNYHHAHDAYLNAVVGTALIKKYPKLESEFVYGDYKVYDVSEQEIGKATAKYFFYSNIMNFFKTEITLANGEIRKRPLIETNGETGEIVWDKGRDFATVRKVLSMPQVNIVKKTEVQTGGFSKESILPKRNSDKLIARKKDWDPKKYGGFDSPTVAYSVLVVAKVEKGKSKKLKSVKELLGITIMERSSFEKDPIDFLEAKGYKEVRKDLIIKLPKYSLFELENGRKRMLASGELQKGNELALPSKYVNFLYLASHYEKLKGSPEDNEQKQLFVEQHKHYLDEIIEQISEFSKRVILADANLDKVLSAYNKHRDKPIREQAENIIHLFTLTNLGAPAAFKYFDTTIDRKRYTSTKEVLDATLIHQSITGLYETRIDLSQLGGD

SEQ ID NO: 40 - protein, 305 aa, Streptococcus pyogenes
IETNGETGEIVWDKGRDFATVRKVLSMPQVNIVKKTEVQTGGFSKESILPKRNSDKLIARKKDWDPKKYGGFDSPTVAYSVLVVAKVEKGKSKKLKSVKELLGITIMERSSFEKDPIDFLEAKGYKEVRKDLIIKLPKYSLFELENGRKRMLASGELQKGNELALPSKYVNFLYLASHYEKLKGSPEDNEQKQLFVEQHKHYLDEIIEQISEFSKRVILADANLDKVLSAYNKHRDKPIREQAENIIHLFTLTNLGAPAAFKYFDTTIDRKRYTSTKEVLDATLIHQSITGLYETRIDLSQLGGD

SEQ ID NO: 41 - protein, 1359 aa, synthetic construct
  REGION 1..1359: note = Synthetic Polypeptide
MDKKYSIGLDIGTNSVGWAVITDDYKVPSKKFKVLGNTDRHSIKKNLIGALLFDSGEIAEATRLKRTARRRYTRRKNRICYLQEIFSNEMAKVDDSFFHRLEESFLVEEDKKHERHPIFGNIVDEVAYHEKYPTIYHLRKKLVDSTDKADLRLIYLALAHMIKFRGHFLIEGDLNPDNSDVDKLFIQLVQTYNQLFEENINASGVDAKAILSARLSKSRRLENLIAQLPGEKKNGLFGNLIALSLGLTPNFKSNFDLAEDAKLQLSKDTYDDDLDNLLAQIGDQYADLFLAAKNLSDAILLSDILRLNSEITKAPLSASMIKRYDEHHQDLTLLKALVRQQLPEKYKEIFFDQSKNGYAGYIDGGASQEEFYKFIKPILEKMDGTEELLAKLNREDLLRKQRTFDNGSIPHQIHLGELHAILRRQEDFYPFLKDNREKIEKILTFRIPYYVGPLARGNSRFAWMTRKSEETITPWNFEEVVDKGASAQSFIERMTNFDKNLPNEKVLPKHSLLYEYFTVYNELTKVKYVTEGMRKPAFLSGEQKKAIVDLLFKTNRKVTVKQLKEDYFKKIECFDSVEISGVEDRFNASLGTYHDLLKIIKDKDFLDNEENEDILEDIVLTLTLFEDREMIEERLKTYAHLFDDKVMKQLKRRRYTGWGRLSRKLINGIRDKQSGKTILDFLKDGFANRNFMQLIHDDSLTFKEDIQKAQVSGQGDSLHEHIANLAGSPAIKKGILQTVKVVDELVKVMGRHKPENIVIEMARENQTTQKGQKNSRERMKRIEEGIKELGSQILKEHPVENTQLQNEKLYLYYLQNGRDMYVDQELDINRLSDYDVDHIVPQSFIKDDSIDNKVLTRSDKNRGKSDNVPSEEVVKKMKNYWRQLLNAKLITQRKFDNLTKAERGGLSELDKAGFIKRQLVETRQITKHVAQILDSRMNTKYDENDKLIREVKVITLKSKLVSDFRKDFQFYKVREINNYHHAHDAYLNAVVGTALIKKYPKLESEFVYGDYKVYDVSEQEIGKATAKYFFYSNIMNFFKTEITLANGEIRKRPLIETNGETGEIVWDKGRDFATVRKVLSMPQVNIVKKTEVQTGGFSKESILPKRNSDKLIARKKDWDPKKYGGFDSPTVAYSVLVVAKVEKGKSKKLKSVKELLGITIMERSSFEKNPIDFLEAKGYKEVRKDLIIKLPKYSLFELENGRKRMLASGELQKGNELALPSKYVNFLYLASHYEKLKGSPEDNEQKQLFVEQHKHYLDEIIEQISEFSKRVILADANLDKVLSAYNKHRDKPIREQAENIIHLFTLTNLGAPTAFKYFDTTIDRKRYTSTKEVLDATFIHQSITGLYETRIDLSQLGGD

SEQ ID NO: 42 - protein, 1341 aa, synthetic construct
  REGION 1..1341: note = Synthetic Polypeptide
MDQKYSIGLDIGTNSVGWAVVTDDYKVPAKKMKVLGNTDKQSIKKNLLGALLFDSGETAEATRLKRTARRRYTRRRNRLRYLQEIFAEEMNKVDENFFQRLDDSFLVDEDKRGERHPIFGNIAAEVKYHDDFPTIYHLRKHLADISQKADLRLVYLALAHMIKFRGHFLIEGQLKAENTNVQALFKDFVEVYDKTVEESHLSEMTVDALSILTEKVSKSRRLENLIAHYPAEKKNTLFGNLIALSLGLQPNFKTNFQLSEDAKLQFSKDTYEEDLEGLLGEIGDEYADLFASAKNLYDAILLSGILTVDDNSTKAPLSASMVKRYEEHQKDLKKLKDFIKVNAPDQYNAIFKDKNKKGYAGYIENGVKQDEFYKYLKGILLQINGSGDFLDKIDREDFLRKQRTFDNGSIPHQIHLQEMHAILRRQEEHYPFLKENQDKIEKILTFRIPYYVGPLARKGSRFAWAEYKADEKITPWNFDDILDKEKSAEKFITRMTLNDLYLPEEKVLPKHSLLYETFTVYNELTKVKYVNEQGEAKFFDANMKQEIFDHVFKENRKVTKDKLLNYLNKEFEEFRIVNLTGLDKENKAFNSSLGTYHDLRKILDKSFLDDKANEKTIEDIIQTLTLFEDREMIRQRLQKYSDIFTKAQLKKLERRHYTGWGRLSYKLINGIRNKENKKTILDYLIDDGYANRNFMQLINDDALSFKEEIARAQIIGDVDDIANVVHDLPGSPAIKKGILQSVKIVDELVKVMGHNPANIIIEMARENQMTDKGRRNSQQRLKLLQDSLKPVNIKNVENQQLQNDRLFLYYIQNGKDMYTGETLDINNLSQYDIDHIIPQAFIKDNSLDNRVLTRSDKNRGKSDDVPSIEVVHEMKSFWSKLLSVKLITQRKFDNLTKAERGGLTEEDKAGFIKRQLVETRQITKHVAQILDERFNTEFDGNKRRIRNVKIITLKSNLVSNFRKEFELYKVREINDYHHAHDAYLNAVVGNALLLKYPQLEPEFVYGEYPKYNSYRSRKSATEKFLFYSNILRFFKKEDIQTNEDGEIAWNKEKHIKILRKVLSYPQVNIVKKTEEQTGGFSKESILPKGESDKLIPRKTKNSYWNPKKYGGFDSPVVAYSILVFADVEKGKSKKLRKVQDMVGITIMEKKRFEKHPVDFLEQRGYRNVRLEKIIKLPKYSLFELENKRRRLLASARELQKGNELVIPQRFTTLLYHSYQIEKNYEPEHREYVEKHKDEFKELLEYISVFSRKYVLADNNLTKIEMLFSKNKDAEVSSLAKSFISLLTFTAFGAPAAFNFFGENIDRKRYTSVTECLNATLIHQSITGLYETRIDLSKLGED

SEQ ID NO: 43 - protein, 1356 aa, synthetic construct
  REGION 1..1356: note = Synthetic Polypeptide
MTKKNYSIGLDIGTNSVGWAVITDDYKVPAKKMKVLGNTDKKYIKKNLLGALLFDSGETAEATRLKRTARRRYTRRKNRLRYLQEIFAEEMTKVDESFFQRLDESFLRWDDDNKKLGRYPIFGNKADVVKYHQEFPTIYHLRKHLADSSEKADLRLVYLALAHMIKFRGHFLIEGELNAENTDVQKIFADFVGVYDRTFDDSHLSEITVDAASILTEKISKSRRLENLIKYYPTEKKNTLFGNLIALALGLQPNFKMNFKLSEDAKLQFSKDSYEEDLGELLGKIGDDYADLFTSAKNLYDAILLSGILIVDDNSTKAPLSASMIKRYVEHQEDLEKLKEFIKANKSELYHDIFKDKNKNGYAGYIENGVKQDEFYKYLKNTLSKIAGSDYFLDKIEREDFLRKQRTFDNGSIPHQIHLQEMHAILRRQGDYYPFLKENQDRIEKILTFRIPYYVGPLARKDSRFSWAEYHSDEKITPWNFDKVIDKEKSAEKFITRMTLNDLYLPEEKVLPKHSHVYETYAVYNELTKIKYVNEQGKDSFFDSNMKQEIFDHVFKENRKVTKEKLLNYLNKEFPEYRIKDLIGLDKENKSFNASLGTYHDLKKILDKAFLDDKVNEEVIEDIIKTLTLFEDKDMIHERLQKYSDIFTADQLKKLERRHYTGWGRLSYKLINGIRNKENNKTILDYLIDDGSANRNFMQLINDDTLPFKQIIQKSQVVGDVDDIEAVVHDLPGSPAIKKGILQSVKIVDELVKVMGDNPDNIVIEMARENQTTNRGRSQSQQRLKKLQNSLKPSYIEDKVENSHLQNDQLFLYYIQNGKDMYTGDELDIDHLSDYDIDHIIPQAFIKDDSIDNRVLTSSAKNRGKSDDVPSLDIVRARKAEWVRLYKSGLISKRKFDNLTKAERGGLTEADKAGFIKRQLVETRQITKHVAQILDARFNTESDENDKVIRDVKVITLKSNLVSQFRKDFEFYKVREINDYHHAHDAYLNAVVGTALLKKYPKLASEFVYGEYKKYDISSDKATAKYFFYSNLMNFFKRVIRYSNGKVIVRPVVEYSKDTEDIAWDKKSNFRTICKVLSYPQVNIVKKVETQTGGFSKESILPKGDSDKLIPRKTKKAYWDTKKYGGFDSPTVAYSVFVVADVEKGKAKKLKTVKELVGISIMERSFFEENPVEFLENKGYHNIREDKLIKLPKYSLFEFEGGKRRLLASASELQKGNEMVIPGHLVKLLYHAQRINSFNSTKYLDYVSAHKKEFEKVLSCVEDFANLYVDVEKNLSKIRAVADSMDNFSIEEISNSFINLLTLTALGAPADFNFLGEKIPRKRYTSTKECLNATLIHQSITGLYETRIDLSKIGEE

SEQ ID NO: 44 - protein, 1365 aa, Streptococcus agalactiae
MNKPYSIGLDIGTNSVGWSIITDDYKVPAKKIRVLGNTDKEYIKKNLIGALLFDGGNTAADRRLKRTARRRYTRRRNRILYLQEIFAEEMSKVDDSFFHRLEDSFLVEEDKRGSKYPIFATLQEEKYYHEKFPTIYHLRKELADKKEKADLRLVYLALAHIIKFRGHFLIEDDRFDVRNTDIQKQYQAFLEIFDTTFENNDLLSQDVDVEAILTDKISKSAKKDRILAQYPNQKSTGIFAEFLKLIVGNQADFKKHFNLEDKTPLQFAKDSYDEDLENLLGQIGDEFADLFSAAKKLYDSVLLSGILTVTDLSTKAPLSASMIQRYDEHREDLKQLKQFVKASLPEKYQEIVADSSKDGYAGYIEGKTNQEAFYKYLSKLLTKQEGSEYFLEKIKNEDFLRKQRTFDNGSIPHQVHLTELRAIIRRQSEYYPFLKENLDRIEKILTFRIPYYVGPLAREKSDFAWMTRKTDDSIRPWNFEDLVDKEKSAEAFIHRMTNNDLYLPEEKVLPKHSLIYEKFTVYNELTKVRFLAEGFKDFQFLNRKQKETIFNSLFKEKRKVTEKDIISFLNKVDGYEGIAIKGIEKQFNASLSTYHDLKKILGKDFLDNTDNELILEDIVQTLTLFEDREMIKKRLDIYKDFFTESQLKKLYRRHYTGWGRLSAKLINGIRNKENQKTILDYLIDDGSANRNFMQLIKDAGLSFKPIIDKARTGSHSDNLKEVIGELAGSPAIKKGILQSLKIVDELVKVMGYEPEQIVVEMARENQTTAKGLSRSRQRLTTLRESLANLKSEKKPKYVKDQVENHHLSDDRLFLYYLQNGKDMYTDDELDIDNLSQYDIDHIIPQAFIKDDSIDNRVLVSSAKNRGKSDDVPSLEIVKDCKVFWKKLLDAKLMSQRKYDNLTKAERGGLTSDDKARFIQRQLVETRQITKHVARILDERFNNELDSKGRRIRKVKIVTLKSNLVSNFRKEFVFYKIREVNNYHHAHDAYLNAVVAKAILTKYPQLEPEFVYGDYPKYNSYKTRKATEKLFFYSNIMNFFKTKVTLADGTVVVKDDIEVNNDTGEIVWDKKKHFATVRKVLSYPQVNIVKKTEIQTGGFSKESILAHGNSDKLIPRKTKDIYLDPKKYGGFDSPIVAYSVLVVADIKKGKAQKLKTVTELLGITIMERSRFEKNPSAFLESKGYLNIRTDKLIILPKYSLFELENGRRRLLASAGELQKGNELALPTQFMKFLYLASRYNESKGKPEEIEKKQEFVNQHVSYFDDIFQIINDFSKRVILADANLEKINRLYQDNKENIPVDELANNIINLFTFTSLGAPAAFKFFDKIVDRKRYTSTKEVLNSTLIHQSITGLYETRIDLGKLGED

SEQ ID NO: 45 - protein, 1365 aa, Streptococcus agalactiae
MNKPYSIGLDIGTNSVGWSIITDDYKVPAKKMRVLGNTDKEYIKKNLIGALLFDGGNTAADRRLKRTARRRYTRRRNRILYLQEIFAEEMSKVDDSFFHRLEDSFLVEEDKRGSKYPIFATLQEEKDYHEKFPTIYHLRKELADKQEKADLRLIYLALAHIIKFRGHFLIEDDRFDVRNTDIQKQYQAFLEIFDTTFENNHLLSQNVDVEAILTDKISKSAKKDRILAQYPNQKSTGIFAEFLKLIVGNQADFKKHFNLEDKTPLQFAKDSYDEDLENLLGQIGDEFADLFSAAKKLYDSVLLSGILTVIDLSTKAPLSASMIQRYDEHREDLKQLKQFVKASLPEKYQEIFADSSKDGYAGYIEGKTNQEAFYKYLSKLLTKQEDSENFLEKIKNEDFLRKQRTFDNGSIPHQVHLTELKAIIRRQSEYYPFLKENQDRIEKILTFRIPYYIGPLAREKSDFAWMTRKTDDSIRPWNFEDLVDKEKSAEAFIHRMTNNDFYLPEEKVLPKHSLIYEKFTVYNELTKVRYKNEQGETYFFDSNIKQEIFDGVFKEHRKVSKKKLLDFLAKEYEEFRIVDVIGLDKENKAFNASLGTYHDLEKILDKDFLDNPDNESILEDIVQTLTLFEDREMIKKRLENYKDLFTESQLKKLYRRHYTGWGRLSAKLINGIRDKESQKTILDYLIDDGRSNRNFMQLINDDGLSFKSIISKAQAGSHSDNLKEVVGELAGSPAIKKGILQSLKIVDELVKVMGYEPEQIVVEMARENQTTNQGRRNSRQRYKLLDDGVKNLASNILKEYPTDNQALQNERLFLYYLQNGRDMYTGEALDIDNLSQYDIDHIIPQAFIKDDSIDNRVLVSSAKNRGKSDDVPSLEIVKDCKVFWKKLLDAKLMSQRKYDNLTKAERGGLTSDDKARFIQRQLVETRQITKHVARILDERFNNELDSKGRRIRKVKIVTLKSNLVSNFRKEFGFYKIREVNDYHHAHDAYLNAVVAKAILTKYPQLEPEFVYGLYRRKKLSKIVRATRKMFFYSNLMNMFKRVVRLADGSIVVRPVIETGRYMGKTAWDKKKHFATVRKVLSYPQVNIVKKTEIQTGGFSKESILAHGNSDKLIPRKTKDIYLDPKKYGGFDSPIVAYSVLVVADIKKGKAQKLKTVTELLGITIMERSKFEKNPSAFLESKGYLNIRDDKLMILPKYSLFELENGRRRLLASAGELQKGNELALPTQFMKFLYLASRYNESKGKPEEIEKKQEFVNQHVSYFDDILQLINDFSKRVILADANLEKINKLYQDNKENISVDELANNIINLFTFTSLGAPAAFKFFDKIVDRKRYTSTKEVLNSTLIHQSITGLYETRIDLSKLGED

SEQ ID NO: 46 - protein, 1365 aa, Streptococcus agalactiae
MNKPYSIGLDIGTNSVGWSIITDDYKVPAKKMRVLGNTDKEYIKKNLIGALLFDGGNTAADRRLKRTARRRYTRRRNRILYLQEIFAEEMSKVDDSFFHRLEDSFLVEEDKRGSKYPIFATLQEEKDYHEKFSTIYHLRKELADKKEKADLRLIYIALAHIIKFRGHFLIEDDSFDVRNTDISKQYQDFLEIFNITFENNDLLSQNVDVEAILTDKISKSAKKDRILAQYPNQKSTGIFAEFLKLIVGNQADFKKYFNLEDKTPLQFAKDSYDEDLENLLGQIGDEFADLFSAAKKLYDSVLLSGILTVIDLSTKAPLSASMIQRYDEHREDLKQLKQFVKASLPEKYQEIFADSSKDGYAGYIEGKTNQEAFYKYLSKLLTKQEDSENFLEKIKNEDFLRKQRTFDNGSIPHQVHLTELKAIIRRQSEYYPFLKENQDRIEKILTFRIPYYIGPLAREKSDFAWMTRKTDDSIRPWNFEDLVDKEKSAEAFIHRMTNNDFYLPEEKVLPKHSLIYEKFTVYNELTKVRYKNEQGETYFFDSNIKQEIFDGVFKEHRKVSKKKLLDFLAKEYEEFRIVDVIGLDKENKAFNASLGTYHDLEKILDKDFLDNPDNESILEDIVQTLTLFEDREMIKKRLENYKDLFTESQLKKLYRRHYTGWGRLSAKLINGIRDKESQKTILDYLIDDGRSNRNFMQLINDDGLSFKSIISKAQAGSHSDNLKEVVGELAGSPAIKKGILQSLKIVDELVKVMGYEPEQIVVEMARENQTTNQGRRNSRQRYKLLDDGVKNLASNILKEYPTDNQALQNERLFLYYLQNGRDMYTGEALDIDNLSQYDIDHIIPQAFIKDDSIDNRVLVSSAKNRGKSDDVPSLEIVKDCKVFWKKLLDAKLMSQRKYDNLTKAERGGLTSDDKARFIQRQLVETRQITKHVARILDERFNNELDSKGRRIRKVKIVTLKSNLVSNFRKEFGFYKIREVNNYHHAHDAYLNAVVAKAILTKYPQLEPEFVYGDYPKYNSYKTRKATEKLFFYSNIMNFFKTKVTLADGTVVVKDDIEVNNDTGEIVWDKKKHFATVRKVLSYPQNNIVKKTEIQTGGFSKESILAHGNSDKLIPRKTKDIYLDPKKYGGFDSPIVAYSVLVVADIKKGKAQKLKTVTELLGITIMERSRFEKNPSAFLESKGYLNIRADKLIILPKYSLFELENGRRRLLASAGELQKGNELALPTQFMKFLYLASRYNESKGKPEEIEKKQEFVNQHVSYFDDILQLINDFSKRVILADANLEKINKLYQDNKENISVDELANNIINLFTFTSLGAPAAFKFFDKIVDRKRYTSTKEVLNSTLIHQSITGLYETRIDLGKLGED

SEQ ID NO: 47 - protein, 1369 aa, Streptococcus agalactiae
MNKPYSIGLDIGTNSVGWSIITDDYKVPAKKMRVLGNTDKEYIKKNLIGALLFDGGNTAADRRLKRTARRRYTRRRNRILYLQEIFAEEMSKVDDSFFHRLEDSFLVEEDKRGSKYPIFATLQEEKDYHEKFSTIYHLRKELADKKEKADLRLIYIALAHIIKFRGHFLIEDDSFDVRNTDISKQYQDFLEIFNTIFENNDLLSQNVDVEAILTDKISKSAKKDRILAQYPNQKSTGIFAEFLKLIVGNQADFKKYFNLEDKTPLQFAKDSYDEDLENLLGQIGDEFADLFSAAKKLYDSVLLSGILTVIDLSTKAPLSASMIQRYDEHREDLKQLKQFVKASLPEKYQEIFADSSKDGYAGYIEGKTNQEAFYKYLSKLLTKQEDSENFLEKIKNEDFLRKQRTFDNGSIPHQVHLTELKAIIRRQSEYYPFLKENQDRIEKILTFRIPYYIGPLAREKSDFAWMTRKTDDSIRPWNFEDLVDKEKSAEAFIHRMTNNDFYLPEEKVLPKHSLIYEKFTVYNELTKVRYKNEQGETYFFDSNIKQEIFDGVFKEHRKVSKKKLLDFLAKEYEEFRIVDVIGLDKENKAFNASLGTYHDLEKILDKDFLDNPDNESILEDIVQTLTLFEDREMIKKRLENYKDLFTESQLKKLYRRHYTGWGRLSAKLINGIRDKESQKTILDYLIDDGRSNRNFMQLINDDGLSFKSIISKAQAGSHSDNLKEVVGELAGSPAIKKGILQSLKIVDELVKVMGYEPEQIVVEMARENQTTNQGRRNSRQRYKLLDDGVKNLASNILKEYPTDNQALQNERLFLYYLQNGRDMYTGEALDIDNLSQYDIDHIIPQAFIKDDSIDNRVLVSSAKNRGKSDDVPSLEIVKDCKVFWKKLLDAKLMSQRKYDNLTKAERGGLTSDDKARFIQRQLVETRQITKHVARILDERFNNELDSKGRRIRKVKIVTLKSNLVSNFRKEFGFYKIREVNNYHHAHDAYLNAVVAKAILTKYPQLEPEFVYGDYPKYNSYKTRKATEKLFFYSNIMNFFKTKVTLADGTVVVKDDIEVNNDTGEIVWDKKKHFATVRKVLSYPQNNIVKKTEIQTGGFSKESILAHGNSDKLIPRKTKDIYLDPKKYGGFDSPIVAYSVLVVADIKKGKAQKLKTVTELLGITIMERSRFEKNPSAFLESKGYLNIRADKLIILPKYSLFELENGRRRLLASAGETIDRLQKGNELALPTQFMKFLYLASRYNESKGKPEEIEKKQEFVNQHVSYFDDILQLINDFSKRVILADANLEKINKLYQDNKENISVDELANNIINLFTFTSLGAPAAFKFFDKIVDRKRYTSTKEVLNSTLIHQSITGLYETRIDLGKLGED

SEQ ID NO: 48 - protein, 1363 aa, Streptococcus agalactiae
MNKPYSIGLDIGTNSVGWSIITDDYKVPAKKMRVLGNTDKEYIKKNLIGALLFDGGNTAADRRLKRTARRRYTRRRNRILYLQEIFAEEMSKVDDSFFHRLEDSFLVEEDKRGSKYPIFATLQEEKDYHEKFSTIYHLRKELADKKEKADLRLIYIALAHIIKFRGHFLIEDDSFDVRNTDISKQYQDFLEIFNTTFENNDLLSQNVDVEAILTDKISKSAKKDRILAQYPNQKSTGIFAEFLKLIVGNQADFKKYFNLEDKTPLQFAKDSYDEDLENLLGQIGDEFADLFSAAKKLYDSVLLSGILTVIDLSTKAPLSASMIQRYDEHREDLKQLKQFVKASLPEKYQEIFADSSKDGYAGYIEGKTNQEAFYKYLSKLLTKQEDSENFLEKIKNEDFLRKQRTFDNGSIPHQVHLTELKAIIRRQSEYYPFLKENQDRIEKILTFRIPYYIGPLAREKSDFAWMTRKTDDSIRPWNFEDLVDKEKSAEAFIHRMTNNDFYLPEEKVLPKHSLIYEKFTVYNELTKVRYKNEQGETYFFDSNIKQEIFDGVFKEHRKVSKKKLLDFLAKEYEEFRIVDVIGLDKENKAFNASLGTYHDLEKILDKDFLDNPDNESILEDIIQTLTLFEDREMIKKRLENYKDLFTESQLKKLYRRHYTGWGRLSAKLINGIRDKESQKTILDYLIDDGRSNRNFMQLINDDGLSFKSIISKAQAGSHSDNLKEVVGELAGSPAIKKGILQSLKIVDELVKVMGYEPEQIVVEMARENQTTNQGRRNSRQRYKLLDDGVKNLASNILKEYPTDNQALQNERLFLYYLQNGRDMYTGEALDIDNLSQYDIDHIIPQAFIKDDSIDNRVLVSSAKNRGKSDDVPSLEIVKDCKVFWKKLLDAKLMSQRKYDNLTKAERGGLTSKARFIQRQLVETRQITKHVARILDERFNNELDSKGRRIRKVKIVTLKSNLVSNFRKEFGFYKIREVNNYHHAHDAYLNAVVAKAILTKYPQLEPEFVYGDYPKYNSYKTRKATEKLFFYSNIMNFFKTKVTLADGTVVVKDDIEVNNDTGEIVWDKKKHFATVRKVLSYPQNNIVKKTEIQTGGFSKESILAHGNSDKLIPRKTKDIYLDPKKYGGFDSPIVAYSVLVVADIKKGKAQKLKTVTELLGITIMERSRFEKNPSAFLESKGYLNIRADKLIILPKYSLFELENGRRRLLASAGELQKGNELALPTQFMKFLYLASRYNESKGKPEEIEKKQEFVNQHVSYFDDILQLINDFSKRVILADANLEKINKLYQDNKENISVDELANNIINLFTFTSLGAPAAFKFFDKIVDRKRYTSTKEVLNSTLIHQSITGLYETRIDLGKLGED

SEQ ID NO: 49 - protein, 1365 aa, Streptococcus agalactiae
MNKPYSIGLDIGTNSVGWSIITDDYKVPAKKMRVLGNTDKEYIKKNLIGALLFDGGNTAADRRLKRTARRRYTRRRNRILYLQEIFAEEMSKVDDSFFHRLEDSFLVEEDKRGSKYPIFATLQEEKDYHEKFSTIYHLRKELADKKEKADLRLIYIALAHIIKFRGHFLIEDDSFDVRNTDISKQYQDFLEIFNTTFENNDLLSQNVDVEAILTDKISKSAKKDRILAQYPNQKSTGIFAEFLKLIVGNQADFKKYFNLEDKTPLQFAKDSYDEDLENLLGQIGDEFADLFSAAKKLYDSVLLSGILTVIDLSTKAPLSASMIQRYDEHREDLKQLKQFVKASLPEKYQEIFADSSKDGYAGYIEGKTNQEAFYKYLSKLLTKQEDSENFLEKIKNEDFLRKQRTFDNGSIPHQVHLTELKAIIRRQSEYYPFLKENQDRIEKILTFRIPYYIGPLAREKSDFAWMTRKTDDSIRPWNFEDLVDKEKSAEAFIHRMTNNDFYLPEEKVLPKHSLIYEKFTVYNELTKVRYKNEQGETYFFDSNIKQEIFDGVFKEHRKVSKKKLLDFLAKEYEEFRIVDVIGLDKENKAFNASLGTYHDLEKILDKDFLDNPDNESILEDIVQTLTLFEDREMIKKRLENYKDLFTESQLKKLYRRHYTGWGRLSAKLINGIRDKESQKTILDYLIDDGRSNRNFMQLINDDGLSFKSIISKAQAGSHSDNLKEVVGELAGSPAIKKGILQSLKIVDELVKVMGYEPEQIVVEMARENQTTNQGRRNSRQRYKLLDDGVKNLASNILKEYPTDNQALQNERLFLYYLQNGRDMYTGEALDIDDLSQYDIDHIIPQAFIKDDSIDNRVLVSSAKNRGKSDDVPSLEIVKDCKVFWKKLLDAKLMSQRKYDNLTKAERGGLTSDDKARFIQRQLVETRQITKHVARILDERFNNELDSKGRRIRKVKIVTLKSNLVSNFRKEFGFYKIREVNNYHHAHDAYLNAVVAKAILTKYPQLEPEFVYGDYPKYNSYKTRKATEKLFFYSNIMNFFKTKVTLADGTVVVKDDIEVNNDTGEIVWDKKKHFATVRKVLSYPQNNIVKKTEIQTGGFSKESILAHGNSDKLIPRKTKDIYLDPKKYGGFDSPIVAYSVLVVADIKKGKAQKLKTVTELLGITIMERSRFEKNPSAFLESKGYLNIRADKLIILPKYSLFELENGRRRLLASAGELQKGNELALPTQFMKFLYLASRYNESKGKPEEIEKKQEFVNQHVSYFDDILQLINDFSKRVILADANLEKINKLYQDNKENISVDELANNIINLFTFTSLGAPAAFKFFDKIVDRKRYTSTKEVLNSTLIHQSITGLYETRIDLGKLGED

SEQ ID NO: 50 - protein, 1365 aa, Streptococcus agalactiae
MNKPYSIGLDIGTNSVGWSIITDDYKVPAKKMRVLGNTDKEYIKKNLIGALLFDGGNTAADRRLKRTARRRYTRRRNRILYLQEIFAEEMSKVDDSFFHRLEDSFLVEEDKRGSKYPIFATLQEEKDYHEKFSTIYHLRKELADKKEKADLRLIYIALAHIIKFRGHFLIEDDSFDVRNTDISKQYQDFLEIFNTTFENNDLLSQNVDVEAILTDKISKSAKKDRILAQYPNQKSTGIFAEFLKLIVGNQADFKKYFNLEDKTPLQFAKDSYDEDLENLLGQIGDEFADLFSAAKKLYDSVLLSGILTVIDLSTKAPLSASMIQRYDEHREDLKQLKQFVKASLPEKYQEIFADSSKDGYAGYIEGKTNQEAFYKYLSKLLTKQEDSENFLEKIKNEDFLRKQRTFDNGSIPHQVHLTELKAIIRRQSEYYPFLKENQDRIEKILTFRIPYYIGPLAREKSDFAWMTRKTDDSIRPWNFEDLVDKEKSAEAFIHRMTNNDFYLPEEKVLPKHSLIYEKFTVYNELTKVRYKNEQGETYFFDSNIKQEIFDGVFKEHRKVSKKKLLDFLAKEYEEFRIVDVIGLDKENKAFNASLGTYHDLEKILDKDFLDNPDNESILEDIVQTLTLFEDREMIKKRLENYKDLFTESQLKKLYRRHYTGWGRLSAKLINGIRDKESQKTILDYLIDDGRSNRNFMQLINDDGLSFKSIISKAQAGSHSDNLKEVVGELAGSPAIKKGILQSLKIVDELVKVMGYEPEQIVVEMARENQTTNQGRRNSRQRYKLLDDGVKNLASNILKEYPTDNQALQNERLFLYYLQNGRDMYTGEALDIDNLSQYDIDHIIPQAFIKDDSIDNRVLVSSAKNRGKSDDVPSLEIVKDCKVFWKKLLDAKLMSQRKYDNLTKAERGGLTSDDKARFIQRQLVETRQITKHVARILDERFNNELDSKGRRIRKVKIVTLKSNLVSNFRKEFGFYKIREVNNYHHAHDAYLNAVVAKAILTKYPQLEPEFVYGDYPKYNSYKTRKATEKLFFYSNIMNFFKTKVTLADGTVVVKDDIEVNNDTGEIVWDKKKHFATVRKVLSYPQNNIVKKTEIQTGGFSKESILAHGNSDKLIPRKTKDIYLDPKKYGGFDSPIVAYSVLVVADIKKGKAQKLKTVTELLGITIMERSRFEKNPSAFLESKGYLNIRADKLIILPKYSLFELENGRRRLLASAGELQKGNELALPTQFMKFLYLASRYNESKGKPEEIEKKQEFVNQHVSYFDDILQLINDFSKRVILADANLEKINKLYQDNKENISVDELANNIINLFTFTSLGAPAAFKFFDKIVDRKRYTSTKEVLNSTLIHQSITGLYETRIDLGKLGED

SEQ ID NO: 51 - protein, 1365 aa, Streptococcus agalactiae
MNKPYSIGLDIGTNSVGWSIITDDYKVPAKKMRVLGNTDKEYIKKNLIGALLFDGGNTAADRRLKRTARRRYTRRRNRILYLQEIFAEEMSKVDDSFFHRLEDSFLVEEDKRGSKYPIFATLQEEKDYHEKFSTIYHLRKELADKKEKADLRLIYIALAHIIKFRGHFLIEDDSFDVRNTDISKQYQDFLEIFNTTFENNDLLSQNVDVEAILTDKISKSAKKDRILAQYPNQKSTGIFAEFLKLIVGNQADFKKYFNLEDKTPLQFAKDSYDEDLENLLGQIGDEFADLFSAAKKLYDSVLLSGILTVIDLSTKAPLSASMIQRYDEHREDLKQLKQFVKASLPEKYQEIFADSSKDGYAGYIEGKTNQEAFYKYLSKLLTKQEDSENFLEKIKNEDFLRKQRTFDNGSIPHQVHLTELKAIIRRQSEYYPFLKENQDRIEKILTFRIPYYIGPLAREKSDFAWMTRKTDDSIRPWNFEDLVDKEKSAEAFIHRMTNNDFYLPEEKVLPKHSLIYEKFTVYNELTKVRYKNEQGETYFFDSNIKQEIFDGVFKEHRKVSKKKLLDFLAKEYEEFRIVDVIGLDKENKAFNASLGTYHDLEKILDKDFLDNPDNESILEDIVQTLTLFEDREMIKKRLENYKDLFTESQLKKLYRRHYTGWGRLSAKLINGIRDKESQKTILDYLIDDGRSNRNFMQLINDDGLSFKSIISKAQAGSHSDNLKEVVGELAGSPAIKKGILQSLKIVDELVKVMGYEPEQIVVEMARENQTTNQGRRNSRQRYKLLDDGVKNLASNILKEYPTDNQALQNERLFLYYLQNGRDMYTGEALDIDNLSQYDIDHIIPQAFIKDDSIDNRVLVSSAKNRGKSDDVPSLEIVKDCKVFWKKLLDAKLMSQRKYDNLTKAERGGLTSDDKARFIQRQLVETRQITKHVARILDERFNNELDSKGRRIRKVKIVTLKSNLVSNFRKEFGFYKIREVNNYHHAHDAYLNAVVAKAILTKYPQLEPEFVYGDYPKYNSYKTRKATEKLFFYSNIMNFFKTKVTLADGTVVVKDDIEVNNDTGEIVWDKKKHFATVRKVLSYPQNNIVKKTEIQTGGFSKESILAHGNSDKLIPRKTKDIYLDPKKYGGFDSPIVAYSVLVVADIKKGKAQKLKTVTELLGITIMERSRFEKNPSAFLESKGYLNIRADKLIILPKYSLFELENGRRRLLASAGELQKGNELALPTQFMKFLYLASRYNESKGKPEEIEKKQEFVNQHVSYFDDILQLINDFSKRVILADANLEKINKLYQDNKENISVDELANNIINLFTFTSLGAPAAFKFFDKIVDRKRYTSTKEVLNSTLIHQSITGLYETRIDLGKLGGD

SEQ ID NO: 52 - protein, 1365 aa, Streptococcus agalactiae
MNKPYSIGLDIGTNSVGWSIITDDYKVPAKKMRVLGNTDKEYIKKNLIGALLFDGGNTAADRRLKRTARRRYTRRRNRILYLQEIFAEEMSKVDDSFFHRLEDSFLVEEDKRGSKYPIFATLQEEKDYHEKFSTIYHLRKELADKKEKADLRLIYIALAHIIKFRGHFLIEDDSFDVRNTDISKQYQDFLEIFNTTFENNDLLSQNVDVEAILTDKISKSAKKDRILAQYPNQKSTGIFAEFLKLIVGNQADFKKYFNLEDKTPLQFAKDSYDEDLENLLGQIGDEFADLFSAAKKLYDSVLLSGILTVIDLSTKAPLSASMIQRYDEHREDLKQLKQFVKASLPEKYQEIFADSSKDGYAGYIEGKTNQEAFYKYLSKLLTKQEDSENFLEKIKNEDFLRKQRTFDNGSIPHQVHLTELKAIIRRQSEYYPFLKENQDRIEKILTFRIPYYIGPLAREKSDFAWMTRKTDDSIRPWNFEDLVDKEKSAEAFIHRMTNNDFYLPEEKVLPKHSLIYEKFTVYNELTKVRYKNEQGETYFFDSNIKQEIFDGVFKEHRKVSKKKLLDFLAKEYEEFRIVDVIGLDKENKAFNASLGTYHDLEKILDKDFLDNPDNESILEDIVQTLTLFEDREMIKKRLENYKDLFTESQLKKLYRRHYTGWGRLSAKLINGIRDKESQKTILDYLIDDGRSNRNFMQLINDDGLSFKSIISKAQAGSHSDNLKEVVGELAGSPAIKKGILQSLKIVDELVKVMGYEPEQIVVEMARENQTTNQGRRNSRQRYKLLDDGVKNLASNILKEYPTDNQALQNERLFLYYLQNGRDMYTGEALDIDNLSQYDIDHIIPQAFIKDDSIDNRVLVSSAKNRGKSDDVPSLEIVKDCKVFWKKLLDAKLMSQRKYDNLTKAERGGLTSDDKARFIQRQLVETRQITKHVARILDERFNNELDSKGRRIRKVKIVTLKSNLVSNFRKEFGFYKIREVNNYHHAHDAYLNAVVAKAILTKYPQLEPEFVYGDYPKYNSYKTRKATEKLFFYSNIMNFFKTKVTLADGTVVVKDDIEVNNDTGEIVWDKKKHFATVRKVLSYPQNNIVKKTEIQTGGFSKESILAHGNSDKLIPRKTKDIYLDPKKYGGFDSPIVAYSVLVVADIKKGKAQKLKTVTELLGITIMERSRFEKNPSAFLESKGYLNIRDDKLMILPKYSLFELENGRRRLLASAGELQKGNELALPTQFMKFLYLASRYNESKGKPEEIEKKQEFVNQHVSYFDDILQLINDFSKRVILADANLEKINKLYQDNKENISVDELANNIINLFTFTSLGAPAAFKFFDKIVDRKRYTSTKEVLNSTLIHQSITGLYETRIDLGKLGED

SEQ ID NO: 53 - protein, 1365 aa, Streptococcus agalactiae
MNKPYSIGLDIGTNSVGWSIITDDYKVPAKKMRVLGNTDKEYIKKNLIGALLFDGGNTAADRRLKRTARRRYTRRRNRILYLQEIFAEEMSKVDDSFFHRLEDSFLVEEDKRGSKYPIFATLQEEKDYHEKFSTIYHLRKELADKKEKADLRLIYIALAHIIKFRGHFLIEDDSFDVRNTDISKQYQDFLEIFNTTFENNDLLSQNVDVEAILTDKISKSAKKDRILAQYPNQKSTGIFAEFLKLIVGNQADFKKYFNLEDKTPLQFAKDSYDEDLENLLGQIGDEFADLFSAAKKLYDSVLLSGILTVIDLSTKAPLSASMIQRYDEHREDLKQLKQFVKASLPEKYQEIFADSSKDGYAGYIEGKTNQEAFYKYLSKLLTKQEDSENFLEKIKNEDFLRKQRTFDNGSIPHQVHLTELKAIIRRQSEYYPFLKENQDRIEKILTFRIPYYIGPLAREKSDFAWMTRKTDDSIRPWNFEDLVDKEKSAEAFIHRMTNNDFYLPEEKVLPKHSLIYEKFTVYNELTKVRYKNEQGETYFFDSNIKQEIFDGVFKEHRKVSKKKLLDFLAKEYEEFRIVDVIGLDKENKAFNASLGTYHDLEKILDKDFLDNPDNESILEDIVQTLTLFEDREMIKKRLENYKDLFTESQLKKLYRRHYTGWGRLSAKLINGIRDKESQKTILDYLIDDGRSNRNFMQLINDDGLSFKSIISKAQAGSHSDNLKEVVGELAGSPAIKKGILQSLKIVDELVKVVGYEPEQIVVEMARENQTTNQGRRNSRQRYKLLDDGVKNLASNILKEYPTDNQALQNERLFLYYLQNGRDMYTGEALDIDNLSQYDIDHIIPQAFIKDDSIDNRVLVSSAKNRGKSDDVPSLEIVKDCKVFWKKLLDAKLMSQRKYDNLTKAERGGLTSDDKARFIQRQLVETRQITKHVARILDERFNNELDSKGRRIRKVKIVTLKSNLVSNFRKEFGFYKIREVNNYHHAHDAYLNAVVAKAILTKYPQLEPEFVYGDYPKYNSYKTRKATEKLFFYSNIMNFFKTKVTLADGTVVVKDDIEVNNDTGEIVWDKKKHFATVRKVLSYPQNNIVKKTEIQTGGFSKESILAHGNSDKLIPRKTKDIYLDPKKYGGFDSPIVAYSVLVVADIKKGKAQKLKTVTELLGITIMERSRFEKNPSAFLESKGYLNIRADKLIILPKYSLFELENGRRRLLASAGELQKGNELALPTQFMKFLYLASRYNESKGKPEEIEKKQEFVNQHVSYFDDILQLINDFSKRVILADANLEKINKLYQDNKENISVDELANNIINLFTFTSLGAPAAFKFFDKIVDRKRYTSTKEVLNSTLIHQSITGLYETRIDLGKLGED

SEQ ID NO: 54 - protein, 1365 aa, Streptococcus agalactiae
MNKPYSIGLDIGTNSVGWSIITDDYKVPAKKMRVLGNTDKEYIKKNLIGALLFDGGNTAADRRLKRTARRRYTRRRNRILYLQEIFAEEMSKVDDSFFHRLEDSFLVEEDKRGSKYPIFATLQEEKDYHEKFSTIYHLRKELADKKEKADLRLIYIALAHIIKFRGHFLIEDDSFDVRNTDISKQYQDFLEIFNTTFENNDLLSQNVDVEAILTDKISKSAKKDRILAQYPNQKSTGIFAEFLKLIVGNQADFKKYFNLEDKTPLQFAKDSYDEDLENLLRQIGDEFADLFSAAKKLYDSVLLSGILTVIDLSTKAPLSASMIQRYDEHREDLKQLKQFVKASLPEKYQEIFADSSKDGYAGYIEGKTNQEAFYKYLSKLLTKQEDSENFLEKIKNEDFLRKQRTFDNGSIPHQVHLTELKAIIRRQSEYYPFLKENQDRIEKILTFRIPYYIGPLAREKSDFAWMTRKTDDSIRPWNFEDLVDKEKSAEAFIHRMTNNDFYLPEEKVLPKHSLIYEKFTVYNELTKVRYKNEQGETYFFDSNIKQEIFDGVFKEHRKVSKKKLLDFLAKEYEEFRIVDVIGLDKENKAFNASLGTYHDLEKILDKDFLDNPDNESILEDIVQTLTLFEDREMIKKRLENYKDLFTESQLKKLYRRHYTGWGRLSAKLINGIRDKESQKTILDYLIDDGRSNRNFMQLINDDGLSFKSIISKAQAGSHSDNLKEVVGELAGSPAIKKGILQSLKIVDELVKVMGYEPEQIVVEMARENQTTNQGRRNSRQRYKLLDDGVKNLASNILKEYPTDNQALQNERLFLYYLQNGRDMYTGEALDIDNLSQYDIDHIIPQAFIKDDSIDNRVLVSSAKNRGKSDDVPSLEIVKDCKVFWKKLLDAKLMSQRKYDNLTKAERGGLTSDDKARFIQRQLVETRQITKHVARILDERFNNELDSKGRRIRKVKIVTLKSNLVSNFRKEFGFYKIREVNNYHHAHDAYLNAVVAKAILTKYPQLEPEFVYGDYPKYNSYKTRKATEKLFFYSNIMNFFKTKVTLADGTVVVKDDIEVNNDTGEIVWDKKKHFATVRKVLSYPQNNIVKKTEIQTGGFSKESILAHGNSDKLIPRKTKDIYLDPKKYGGFDSPIVAYSVLVVADIKKGKAQKLKTVTELLGITIMERSRFEKNPSAFLESKGYLNIRADKLIILPKYSLFELENGRRRLLASAGELQKGNELALPTQFMKFLYLASRYNESKGKPEEIEKKQEFVNQHVSYFDDILQLINDFSKRVILADANLEKINKLYQDNKENISVDELANNIINLFTFTSLGAPAAFKFFDKIVDRKRYTSTKEVLNSTLIHQSITGLYETRIDLGKLGED

SEQ ID NO: 55 - protein, 1365 aa, Streptococcus agalactiae
MNKPYSIGLDIGTNSVGWSIITDDYKVPAKKMRVLGNTDKEYIKKNLIGALLFDGGNTAADRRLKRTARRRYTRRRNRILYLQEIFAEEMSKVDDSFFHRLEDSFLVEEDKRGSKYPIFATMQEEKDYHEKFPTIYHLRKELADKKEKADLRLVYLALAHIIKFRGHFLIEDDRFDVRNTDIQKQYQAFLEIFDTSFENNHLLSQNVDVEAILTDKISKSAKKDRILAQYPNQKSTGIFAEFLKLIVGNQADFKKHFNLEDKTPLQFAKDSYDEDLENLLGQIGDEFADLFSAAKKLYDSVLLSGILTVTDLSTKAPLSAYMIQRYDEHREDLKQLKQFVKASLPEKYQEIFADSSKDGYAGYIEGKTNQEAFYKYLSKLLTKQEDSEYFLEKIKNEDFLRKQRTFDNGSIPHQVHLTELKAIIRRQSEYYPFLKENQDKIEKILTFRIPYYVGPLARGNSDFAWMTRKTDDSIRPWNFEDLVDKEKSAEAFIHRMTNNDLYLPEEKVLPKHSLIYEKFTVYNELTKVRYKNEQGETYFFDSNVKQEIFDGVFKEHRKVSKKQLLDFLAKEFEEFRIVDVTGLDKENKAFNASLGTYHDLKKILDKDFLDNPDNESILEDIVQTITLFEDREMIKKRLENYKDLFTESQLKKLYRRHYTGWGRLSAKLINGIRDRESQKTILDYLISDGRANRNFMQLINDDGLSFKSIISKAQSGSHSDNLKEVVGELAGSPAIKKGILQSLKIVDELVKVMGYEPEQIVVEMARENQTTNQGRRNSRQRYKLLEDGVKNLASDILKEYPTDNQALQNERLFLYYLQNGRDMYTGEALDIDNLSQYDIDHIVPQAFIKDDSIDNRVLVSSAKNRGKSDDVPSIDIVKARKAFWKKLLDAKLISQRKYDNLTKAERGGLTPDDKAGFIQRQLVETRQITKHVARILDERFNNKVDDNNKPIRKVKIVTLKSNLVSNFRKEFGFYKIREVNNYHHAHDAYLNAVVAKAILTKYPQLEPEFVYGDYPKYNSYKTRKATEKLFFYSNIMNFFKTKVTLADETVVVKDDIEVNNETGEIAWDKKKHFATVRKVLSYPQVNIVKKTEVQTGGFSKESILAHSNSDKLIPRKTKDIYLDPKKYGGFDSPIVAYSVLVLADIKKGKAQKLKTVKELIGITIMERERFEKNPSAFLESKGYLNIRTDKLIILPKYSLFELENGRRRLLASAGELQKGNELALPTQYMKFLYLASRYNESKGKPEEIEKKQEFVNQHISYFDDILQLINDFSKRVILADANLEKINKLYSDNKDNTPVDELAKNIINLFTFTSLGAPAAFKFFDKSVDRKRYTSTKEVLDSTLIHQSITGLYETRIDLGKLGED

SEQ ID NO: 56 - protein, 1365 aa, Streptococcus agalactiae
MNKPYSIGLDIGTNSVGWSIITDDYKVPAKKMRVLGNTDKEYIKKNLIGALLFDGGNTAADRRLKRTARRRYTRRRNRILYLQEIFAEEMSKVDDSFFHRLEDSFLVEEDKRGSKYPIFATMQEEKYYHEKFPTIYHLRKELADKKEKADLRLIYLALAHIIKFRGHFLIEDDRFDVRNTDIQKQYQAFLEIFDTTFENNDLLSQNVDVEAILTDKISKSAKKDRILARYPNQKSTGIFAEFLKLIVGNQADFKKHFNLEDKTPLQFAKDSYDEDLENLLGQIGDEFADLFSAAKKLYDSVLLSGILTVTDLSTKAPLSASMIQHYDEHREDLKQLKQFVKASLPEKYQEIFADSSKDGYAGYIEGKTNQEAFYKYLSKLLTKQEGSEYLLEKIKNEDFLRKQRTFDNGSIPHQVHLTELRAIIRRQSEYYPFLKENLDRIEKILTFRIPYYVGPLAREKSDFAWMTRKTDDSIRPWNFEDLVDKEKSAEAFIHRMTNNDLYLPEEKVLPKHSLIYEKFTVYNELTKVRFLAEGFKDFQFLNRKQKETIFNSLFKEKRKVTEKDIISFLNKVDGYEGIAIKGIEKQFNASLSTYHDLKKILGKDFLDNTDNELILEDIVQTLTLFEDREMIRKRLDIYKDFFTESQLKKLYRRHYTGWGRLSAKLINGIRNKENQKTILDYLIDDGSANRNFMQLIKDAGLSFKPIIDKARTGSHSDNLKEVVGELAGSPAIKKGILQSLKIVDELVKVMGYEPEQIVVEMARENQTTAKGLSRSRQRLTTLRESLANLKSEKKPKYVKDQVENHHLSDDRLFLYYLQNGKDMYTDDELDIDNLSQYDIDHIIPQAFIKDDSIDNRVLVSSAKNRGKSDDVPSVEIVKDCKVFWKKLLDAKLMSQRKYDNLTKAERGGLTSDDKARFIQRQLVETRQITKHVARILDERFNNELDSKGRRIRKVKIVTLKSNLVSNFRKEFGFYKIREVNNYHHAHDAYLNAVVAKAILTKYPQLEPEFVYGDYPKYNSYKTRKATEKLFFYSNIMNFFKTKVTLADGTVVVKDDIEVNNDTGEIVWDKKKHFATVRKVLSYPQVNIVKKTEIQTGGFSKESILAHGNSDKLIPRKTKDIYLDPKKYGGFDSPIVAYSVLVVADIKKGKAQKLKTVTELLGITIMERSRFEKNPSAFLESKGYLNIRDDKLMILPKYSLFELENGRRRLLASAGELQKGNELALPTQFMKFLYLASRYNELKGKPEEIEQKQEFVVQHVSYFDDILQIINDFSNRVILADANLEKINKLYQDNKENIPVDELANNIINLFTFTSLGAPAAFKFFDKIVDRKRYTSTKEVLNSTLIHQSITGLYETRIDLGKLGED

SEQ ID NO: 57 - protein, 1365 aa, Streptococcus agalactiae
MNKPYSIGLDIGTNSVGWSIITDDYKVPAKKMRVLGNTDKEYIKKNLIGALLFDGGNTAADRRLKRTARRRYTRRRNRILYLQEIFAEEMSKVDDSFFHRLEDSFLVEEDKRGSKYPIFATMQEEKYYHEKFPTIYHLRKELADKKEKADLRLIYLALAHIIKFRGHFLIEDDRFDVRNTDIQKQYQAFLEIFDTTFENNDLLSQNVDVEAILTDKISKSAKKDRILARYPNQKSTGIFAEFLKLIVGNQADFKKHFNLEDKTPLQFAKDSYDEDLENLLGQIGDEFADLFSAAKKLYDSVLLSGILTVTDLSTKAPLSASMIQRYDEHREDLKQLKQFVKASLPEKYQEIFADSSKDGYAGYIEGKTNQEAFYKYLSKLLTKQEGSEYLLEKIKNEDFLRKQRTFDNGSIPHQVHLTELRAIIRRQSEYYPFLKENLDRIEKILTFRIPYYVGPLAREKSDFAWMTRKTDDSIRPWNFEDLVDKEKSAEAFIHRMTNNDLYLPEEKVLPKHSLIYEKFTVYNELTKVRFLAEGFKDFQFLNRKQKETIFNSLFKEKRKVTEKDIISFLNKVDGYEGIAIKGIEKQFNASLSTYHDLKKILGKDFLDNTDNELILEDIVQTLTLFEDREMIRKRLDIYKDFFTESQLKKLYRRHYTGWERLSAKLINGIRNKENQKTILDYLIDDGSANRNFMQLIKDAGLSFKPIIDKARTGSHLDNLKEVVGELAGSPAIKKGILQSLKIVDELVKVMGYEPEQIVVEMARENQTTAKGLSRSRQRLTTLRESLANLKSEKKPKYVKDQVENHHLSDDRLFLYYLQNGKDMYTDDELDIDNLSQYDIDHIIPQAFIKDDSIDNRVLVSSAKNRGKSDDVPSLEIVKDCKVFWKKLLDAKLMSQRKYDNLTKAERGGLTSDDKARFIQRQLVETRQITKHVARILDERFNNELDSKGRRIRKVKIVTLKSNLVSNFRKEFGFYKIREVNNYHHAHDAYLNAVVAKAILTKYPQLEPEFVYGDYPKYNSYKTRKATEKLFFYSNIMNFFKTKVTLADGTVVVKDDIEVNNDTGEIVWDKKKHFATVRKVLSYPQVNIVKKTEVQTGGFSKESILAHGNSDKLIPRKTKDIYLDPKKYGGFDSPIVAYSVLVVADIKKGKAQKLKTVTELLGITIMERSRFEKNPSAFLESKGYLNIRTDKLIILPKYSLFELENGRRRLLASAGELQKGNELALPTQYMKFLYLASRYNELKGKPEEIEQKQEFVVQHVSYFDDILQIINDFSNRVILADANLEKINKLYQDNKENIPVDELANNIINLFTFTSLGAPAAFKFFDKIVDRKRYTSTKEVLNSTLIHQSITGLYETRIDLGKLGEG

SEQ ID NO: 58 - protein, 1365 aa, Streptococcus agalactiae
MNKPYSIGLDIGTNSVGWSIITDDYKVPAKKMRVLGNTDKEYIKKNLIGALLFDGGNTAADRRLKRTARRRYTRRRNRILYLQEIFAEEMSKVDDSFFHRLEDSFLVEEDKRGSKYPIFATMQEEKYYHEKFPTIYHLRKELADKKEKADLRLIYLALAHIIKFRGHFLIEDDRFDVRNTDIQKQYQAFLEIFDTTFENNDLLSQNVDVEAILTDKISKSAKKDRILARYPNQKSTGIFAEFLKLIVGNQADFKKHFNLEDKTPLQFAKDSYDEDLENLLGQIGDEFADLFSAAKKLYDSVLLSGILTVTDLSTKAPLSASMIQRYDEHREDLKQLKQFVKASLPEKYQEIFADSSKDGYAGYIEGKTNQEAFYKYLSKLLTKQEGSEYLLEKIKNEDFLRKQRTFDNGSIPHQVHLTELRAIIRRQSEYYPFLKENLDRIEKILTFRIPYYVGPLAREKSDFAWMTRKTDDSIRPWNFEDLVDKEKSAEAFIHRMTNNDLYLPEEKVLPKHSLIYEKFTVYNELTKVRFLAEGFKDFQFLNRKQKETIFNSLFKEKRKVTEKDIISFLNKVDGYEGIAIKGIEKQFNASLSTYHDLKKILGKDFLDNTDNELILEDIVQTLTLFEDREMIRKRLDIYKDFFTESQLKKLYRRHYTGWGRLSAKLINGIRNKENQKTILDYLIDDGSANRNFMQLIKDAGLSFKPIIDKARTGSHLDNLKEVVGELAGSPAIKKGILQSLKIVDELVKVMGYEPEQIVVEMARENQTTAKGLSRSRQRLTTLRESLANLKSEKKPKYVKDQVENHHLSDDRLFLYYLQNGKDMYTDDELDIDNLSQYDIDHIIPQAFIKDDSIDNRVLVSSAKNRGKSDDVPSLEIVKDCKVFWKKLLDAKLMSQRKYDNLTKAERGGLTSDDKARFIQRQLVETRQITKHVARILDERFNNELDSKGRRIRKVKIVTLKSNLVSNFRKEFGFYKIREVNNYHHAHDAYLNAVVAKAILTKYPQLEPEFVYGDYPKYNSYKTRKATEKLFFYSNIMNFFKTKVTLADGTVVVKDDIEVNNDTGEIVWDKKKHFATVRKVLSYPQVNIVKKTEVQTGGFSKESILAHGNSDKLIPRKTKDIYLDPKKYGGFDSPIVAYSVLVVADIKKGKAQKLKTVTELLGITIMERSRFEKNPSAFLESKGYLNIRTDKLIILPKYSLFELENGRRRLLASAGELQKGNELALPTQYMKFLYLASRYNELKGKPEEIEQKQEFVVQHVSYFDDILQIINDFSNRVILADANLEKINKLYQDNKENIPVDELANNIINLFTFTSLGAPAAFKFFDKIVDRKRYTSTKEVLNSTLIHQSITGLYETRIDLGKLGEG

SEQ ID NO: 59 - protein, 1365 aa, Streptococcus agalactiae
MNKPYSIGLDIGTNSVGWSIITDDYKVPAKKMRVLGNTDKEYIKKNLIGALLFDGGNTAADRRLKRTARRRYTRRRNRILYLQEIFAEEMSKVDDSFFHRLEDSFLVEEDKRGSKYPIFATMQEEKYYHEKFPTIYHLRKELADKKEKADLRLIYLALAHIIKFRGHFLIEDDRFDVRNTDIQKQYQAFLEIFDTTFENNDLLSQNVDVEAILTDKISKSAKKDRILARYPNQKSTGIFAEFLKLIVGNQADFKKHFNLEDKTPLQFAKDSYDEDLENLLGQIGDEFADLFSAAKKLYDSVLLSGILTVTDLSTKAPLSASMIQRYDEHREDLKQLKQFVKASLPEKYQEIFADSSKDGYAGYIEGKTNQEAFYKYLSKLLTKQEGSEYLLEKIKNEDFLRKQRTFDNGSIPHQVHLTELRAIIRRQSEYYPFLKENLDRIEKILTFRIPYYVGPLAREKSDFAWMTRKTDDSIRPWNFEDLVDKEKSAEAFIHRMTNNDLYLPEEKVLPKHSLIYEKFTVYNELTKVRFLAEGFKDFQFLNRKQKETIFNSLFKEKRKVTEKDIISFLNKVDGYEGIAIKGIEKQFNASLSTYHDLKKILGKDFLDNTDNELILEDIVQTLTLFEDREMIRKRLDIYKDFFTESQLKKLYRRHYTGWGRLSAKLINGIRNKENQKTILDYLIDDGSANRNFMQLIKDAGLSFKPIIDKARTGSHSDNLKEVVGELAGSPAIKKGILQSLKIVDELVKVMGYEPEQIVVEMARENQTTAKGLSRLRQRLTTLRESLANLKSEKKPKYVKDQVENHHLSDDRLFLYYLQNGKDMYTDDELDIDNLSQYDIDHIIPQAFIKDDSIDNRVLVSSAKNRGKSDDVPSVEIVKDCKVFWKKLLDAKLMSQRKYDNLTKAERGGLTSDDKARFIQRQLVETRQITKHVARILDERFNNELDSKGRRIRKVKIVTLKSNLVSNFRKEFGFYKIREVNNYHHAHDAYLNAVVAKAILTKYPQLEPEFVYGDYPKYNSYKTRKATEKLFFYSNIMNFFKTKVTLADGTVVVKDDIEVNNDTGEIVWDKKKHFATVRKVLSYPQVNIVKKTEIQTGGFSKESILAHGNSDKLIPRKTKDIYLDPKKYGGFDSPIVAYSVLVVADIKKGKAQKLKTVTELLGITIMERSRFEKNPSAFLESKGYLNIRDDKLMILPKYSLFELENGRRRLLASADELQKGNELALPTQFMKFLYLASRYNELKGKPEEIEQKQEFVVQHVSYFDDILQIINDFSNRVILADANLEKINKLYQDNKENIPVDELANNIINLFTFTSLGAPAAFKFFDKIVDRKRYTSTKEVLNSTLIHQSITGLYETRIDLGKLGED

SEQ ID NO: 60 - protein, 1365 aa, Streptococcus agalactiae
MNKPYSIGLDIGTNSVGWSIITDDYKVPAKKMRVLGNTDKEYIKKNLIGALLFDGGNTAADRRLKRTARRRYTRRRNRILYLQEIFAEEMSKVDDSFFHRLEDSFLVEEDKRGSKYPIFATMQEEKYYHEKFPTIYHLRKELADKKEKADLRLIYLALAHIIKFRGHFLIEDDRFDVRNTDIQKQYQAFLEIFDTTFENNDLLSQNVDVEAILTDKISKSAKKDRILARYPNQKSTGIFAEFLKLIVGNQADFKKHFNLEDKTPLQFAKDSYDEDLENLLGQIGDEFADLFSAAKKLYDSVLLSGILTVTDLSTKAPLSASMIQRYDEHREDLKQLKQFVKASLPEKYQEIFADSSKDGYAGYIEGKTNQEAFYKYLSKLLTKQEGSEYLLEKIKNEDFLRKQRTFDNGSIPHQVHLTELRAIIRRQSEYYPFLKENLDRIEKILTFRIPYYVGPLAREKSDFAWMTRKTDDSIRPWNFEDLVDKEKSAEAFIHRMTNNDLYLPEEKVLPKHSLIYEKFTVYNELTKVRFLAEGFKDFQFLNRKQKETIFNSLFKEKRKVTEKDIISFLNKVDGYEGIAIKGIEKQFNASLSTYHDLKKILGKDFLDNTDNELILEDIVQTLTLFEDREMIRKRLDIYKDFFTESQLKKLYRRHYTGWGRLSAKLINGIRNKENQKTILDYLIDDGSANRNFMQLIKDAGLSFKPIIDKARTGSHSDNLKEVVGELAGSPAIKKGILQSLKIVDELVKVMGYEPEQIVVEMARENQTTAKGLSRSRQRLTTLRESLANLKSEKKPKYVKDQVENHHLSDDRLFLYYLQNGKDMYTDDELDIDNLSQYDIDHIIPQAFIKDDSIDNRVLVSSAKNRGKSDDVPSVEIVKDCKVFWKKLLDAKLMSQRKYDNLTKAERGGLTSDDKARFIQRQLVETRQITKHVARILDERFNNELDSKGRRIRKVKIVTLKSNLVSNFRKEFGFYKIREVNNYHHAHDAYLNAVVAKAILTKYPQLEPEFVYGDYPKYNSYKTRKATEKLFFYSNIMNFFKTKVTLADGTVVVKDDIEVNNDTGEIVWDKKKHFATVRKVLSYPQVNIVKKTEIQTGGFSKESILAHGNSDKLIPRKTKDIYLDPKKYGGFDSPIVAYSVLVVADIKKGKAQKLKTVTELLGITIMERSRFEKNPSAFLESKGYLNIRDDKLMILPKYSLFELENGRRRLLASAGELQKGNELALPTQFMKFLYLASRYNELKGKPEEIEQKQEFVVQHVSYFDDILQIINDFSNRVILADANLEKINKLYQDNKENIPVDELANNIINLFTFTSLGAPAAFKFFDKIVDRKRYTSTKEVLNSTLIHQSITGLYETRIDLGKLGED

SEQ ID NO: 61 - protein, 1365 aa, Streptococcus agalactiae
MNKPYSIGLDIGTNSVGWSIITDDYKVPAKKMRVLGNTDKEYIKKNLIGALLFDGGNTAADRRLKRTARRRYTRRRNRILYLQEIFAEEMSKVDDSFFHRLEDSFLVEEDKRGSKYPIFATMQEEKYYHEKFPTIYHLRKELADKKEKADLRLIYLALAHIIKFRGHFLIEDDRFDVRNTDIQKQYQAFLEIFDTTFENNDLLSQNVDVEAILTDKISKSAKKDRILARYPNQKSTGIFAEFLKLIVGNQADFKKHFNLEDKTPLQFAKDSYDEDLENLLGQIGDEFADLFSAAKKLYDSVLLSGILTVTDLSTKAPLSASMIQRYDEHREDLKQLKQFVKASLPEKYQEIFADSSKDGYAGYIEGKTNQEAFYKYLSKLLTKQEGSEYLLEKIKNEDFLRKQRTFDNGSIPHQVHLTELRAIIRRQSEYYPFLKENLDRIEKILTFRIPYYVGPLAREKSDFAWMTRKTDDSIRPWNFEDLVDKEKSAEAFIHRMTNNDLYLPEEKVLPKHSLIYEKFTVYNELTKVRFLAEGFKDFQFLNRKQKETIFNSLFKEKRKVTEKDIISFLNKVDGYEGIAIKGIEKQFNASLSTYHDLKKILGKDFLDNTDNELILEDIVQTLTLFEDREMIRKRLDIYKDFFTESQLKKLYRRHYTGWGRLSAKLINGIRNKENQKTILDYLIDDGSANRNFMQLIKDAGLSFKPIIDKARTGSHSDNLKEVVGELAGSPAIKKGILQSLKIVDELVKVMGYEPEQIVVEMARENQTTAKGLSRSRQRLTTLRESLANLKSEKKPKYVKDQVENHHLSDDRLFLYYLQNGKDMYTDDELDIDNLSQYDIDHIIPQAFIKDDSIDNRVLVSSAKNRGKSDDVPSVEIVKDCKVFWKKLLDAKLMSQRKYDNLTKAERGGLTSDDKARFIQRQLVETRQITKHVARILDERFNNELDSKGRRIRKVKIVTLKSNLVSNFRKEFGFYKIREVNNYHHAHDAYLNAVVAKAILTKYPQLEPEFVYGDYPKYNSYKTRKATEKLFFYSNIMNFFKTKVTLADGTVVVKDDIEVNNDTGEIVWDKKKHFATVRKVLSYPQVNIVKKTEIQTGGFSKESILAHGNSDKLIPRKTKDIYLDPKKYGGFDSPKVAYSVLVVADIKKGKAQKLKTVTELLGITIMERSRFEKNPSAFLESKGYLNIRDDKLMILPKYSLFELENGRRRLLASAGELQKGNELALPTQFMKFLYLASRYNELKGKPEEIEQKQEFVVQHVSYFDDILQIINDFSNRVILADANLEKINKLYQDNKENIPVDELANNIINLFTFTSLGAPAAFKFFDKIVDRKRYTSTKEVLNSTLIHKSITGLYETRIDLGKLGED

SEQ ID NO: 62 - protein, 1365 aa, Streptococcus agalactiae
MNKPYSIGLDIGTNSVGWSIITDDYKVPAKKMRVLGNTDKEYIKKNLIGALLFDGGNTAADRRLKRTARRRYTRRRNRILYLQEIFAEEMSKVDDSFFHRLEDSFLVEEDKRGSKYPIFATMQEEKYYHEKFPTIYHLRKELADKKEKADLRLIYLALAHIIKFRGHFLIEDDRFDVRNTDIQKQYQAFLEIFDTTFENNDLLSQNVDVEAILTDKISKSAKKDRILARYPNQKSTGIFAEFLKLIVGNQADFKKHFNLEDKTPLQFAKDSYDEDLENLLGQIGDEFADLFSAAKKLYDSVLLSGILTVTDLSTKAPLSASMIQRYDEHREDLKQLKQFVKASLPEKYQEIFADSSKDGYAGYIEGKTNQEAFYKYLSKLLTKQEGSEYLLEKIKNEDFLRKQRTFDNGSIPHQVHLTELRAIIRRQSEYYPLLKENLDRIEKILTFRIPYYVGPLAREKSDFAWMTRKTDDSIRPWNFEDLVDKEKSAEAFIHRMTNNDLYLPEEKVLPKHSLIYEKFTVYNELTKVRFLAEGFKDFQFLNRKQKETIFNSLFKEKRKVTEKDIISFLNKVDGYEGIAIKGIEKQFNASLSTYHDLKKILGKDFLDNTDNELILEDIVQTLTLFEDREMIRKRLDIYKDFFTESQLKKLYRRHYTGWGRLSAKLINGIRNKENQKTILDYLIDDGSANRNFMQLIKDAGLSFKPIIDKARTGSHSDNLKEVVGELAGSPAIKKGILQSLKIVDELVKVMGYEPEQIVVEMARENQTTAKGLSRSRQRLTTLRESLANLKSEKKPKYVKDQVENHHLSDDRLFLYYLQNGKDMYTDDELDIDNLSQYDIDHIIPQAFIKDDSIDNRVLVSSAKNRGKSDDVPSVEIVKDCKVFWKKLLDAKLMSQRKYDNLTKAERGGLTSDDKARFIQRQLVETRQITKHVARILDERFNNELDSKGRRIRKVKIVTLKSNLVSNFRKEFGFYKIREVNNYHHAHDAYLNAVVAKAILTKYPQLEPEFVYGDYPKYNSYKTRKATEKLFFYSNIMNFFKTKVTLADGTVVVKDDIEVNNDTGEIVWDKKKHFATVRKVLSYPQVNIVKKTEIQTGGFSKESILAHGNSDKLIPRKTKDIYLDPKKYGGFDSPIVAYSVLVVADIKKGKAQKLKTVTELLGITIMERSRFEKNPSAFLESKGYLDIRDDKLMILPKYSLFELENGRRRLLASAGELQKGNELALPTQFMKFLYLASRYNELKGKPEEIEQKQEFVVQHVSYFDDILQIINDFSNRVILADANLEKINKLYQDNKENIPVDELANNIINLFTFTSLGAPAAFKFFDKIVDRKRYTSTKEVLNSTLIHQSITGLYETRIDLGKLGED

SEQ ID NO: 63 - protein, 1365 aa, Streptococcus agalactiae
  VARIANT 117: note = Xaa can be any naturally occurring amino acid
MNKPYSIGLDIGTNSVGWSIITDDYKVPAKKMRVLGNTDKEYIKKNLIGALLFDGGNTAADRRLKRTARRRYTRRRNRILYLQEIFAEEMSKVDDSFFHRLEDSFLVEEDKRGSKYXIFATLQEEKDYHEKFSTIYHLRKELADKKEKADLRLIYIALAHIIKFRGHFLIEDDSFDVRNTDISKQYQDFLEIFNTTFENNDLLSQNVDVEAILTDKISKSAKKDRILAQYPNQKSTGIFAEFLKLIVGNQADFKKYFNLEDKTPLQFAKDSYDEDLENLLGQIGDEFADLFSAAKKLYDSVLLSGILTVIDLSTKAPLSASMIQRYDEHREDLKQLKQFVKASLPEKYQEIFADSSKDGYAGYIEGKTNQEAFYKYLSKLLTKQEDSENFLEKIKNEDFLRKQRTFDNGSIPHQVHLTELKAIIRRQSEYYPFLKENQDRIEKILTFRIPYYIGPLAREKSDFAWMTRKTDDSIRPWNFEDLVDKEKSAEAFIHRMTNNDFYLPEEKVLPKHSLIYEKFTVYNELTKVRYKNEQGETYFFDSNIKQEIFDGVFKEHRKVSKKKLLDFLAKEYEEFRIVDVIGLDKENKAFNASLGTYHDLEKILDKDFLDNPDNESILEDIVQTLTLFEDREMIKKRLENYKDLFTESQLKKLYRRHYTGWGRLSAKLINGIRDKESQKTILDYLIDDGRSNRNFMQLINDDGLSFKSIISKAQAGSHSDNLKEVVGELAGSPAIKKGILQSLKIVDELVKVMGYEPEQIVVEMARENQTTNQGRRNSRQRYKLLDDGVKNLASNILKEYPTDNQALQNERLFLYYLQNGRDMYTGEALDIDNLSQYDIDHIIPQAFIKDDSIDNRVLVSSAKNRGKSDDVPSLEIVKDCKVFWKKLLDAKLMSQRKYDNLTKAERGGLTSDDKARFIQRQLVETRQITKHVARILDERFNNELDSKGRRIRKVKIVTLKSNLVSNFRKEFGFYKIREVNNYHHAHDAYLNAVVAKAILTKYPQLEPEFVYGDYPKYNSYKTRKATEKLFFYSNIMNFFKTKVTLADGTVVVKDDIEVNNDTGEIVWDKKKHFATVRKVLSYPQNNIVKKTEIQTGGFSKESILAHGNSDKLIPRKTKDIYLDPKKYGGFDSPIVAYSVLVVADIKKGKAQKLKTVTELLGITIMERSRFEKNPSAFLESKGYLNIRADKLIILPKYSLFELENGRRRLLASAGELQKGNELALPTQFMKFLYLASRYNESKGKPEEIEKKQEFVNQHVSYFDDILQLINDFSKRVILADANLEKINKLYQDNKENISVDELANNIINLFTFTSLGAPAAFKFFDKIVDRKRYTSTKEVLNSTLIHQSITGLYETRIDLGKLGED

SEQ ID NO: 64 - protein, 1365 aa, Streptococcus agalactiae
MNKPYSIGLDIGTNSVGWSIITDDYKVPAKKMRVLGNTDKEYIKKNLIGALLFDGGNTAADRRLKRTSRRRYTRRRNRILYLQEIFAEEMSKVDDSFFHRLEDSFLVEEDKRGSKYPIFATLQEEKDYHEKFSTIYHLRKELADKKEKADLRLIYIALAHIIKFRGHFLIEDDSFDVRNTDISKQYQDFLEIFNTTFENNDLLSQNVDVEAILTDKISKSAKKDRILAQYPNQKSTGIFAEFLKLIVGNQADFKKYFNLEDKTPLQFAKDSYDEDLENLLGQIGDEFADLFSAAKKLYDSVLLSGILTVIDLSTKAPLSASMIQRYDEHREDLKQLKQFVKASLPEKYQEIFADSSKDGYAGYIEGKTNQEAFYKYLSKLLTKQEDSENFLEKIKNEDFLRKQRTFDNGSIPHQVHLTELKAIIRRQSEYYPFLKENQDRIEKILTFRIPYYIGPLAREKSDFAWMTRKTDDSIRPWNFEDLVDKEKSAEAFIHRMTNNDFYLPEEKVLPKHSLIYEKFTVYNELTKVRYKNEQGETYFFDSNIKQEIFDGVFKEHRKVSKKKLLDFLAKEYEEFRIVDVIGLDKENKAFNASLGTYHDLEKILDKDFLDNPDNESILEDIVQTLTLFEDREMIKKRLENYKDLFTESQLKKLYRRHYTGWGRLSAKLINGIRDKESQKTILDYLIDDGRSNRNFMQLINDDGLSFKSIISKAQAGSHSDNLKEVVGELAGSPAIKKGILQSLKIVDELVKVMGYEPEQIVVEMARENQTTNQGRRNSRQRYKLLDDGVKNLASNILKEYPTDNQALQNERLFLYYLQNGRDMYTGEALDIDNLSQYDIDHIIPQAFIKDDSIDNRVLVSSAKNRGKSDDVPSLEIVKDCKVFWKKLLDAKLMSQRKYDNLTKAERGGLTSDDKARFIQRQLVETRQITKHVARILDERFNNELDSKGRRIRKVKIVTLKSNLVSNFRKEFGFYKIREVNNYHHAHDAYLNAVVAKAILTKYPQLEPEFVYGDYPKYNSYKTRKATEKLFFYSNIMNFFKTKVTLADGTVVVKDDIEVNNDTGEIVWDKKKHFATVRKVLSYPQNNIVKKTEIQTGGFSKESILAHGNSDKLIPRKTKDIYLDPKKYGGFDSPIVAYSVLVVADIKKGKAQKLKTVTELLGITIMERSRFEKNPSAFLESKGYLNIRADKLIILPKYSLFELENGRRRLLASAGELQKGNELALPTQFMKFLYLASRYNESKGKPEEIEKKQEFVNQHVSYFDDILQLINDFSKRVILADANLEKINKLYQDNKENISVDELANNIINLFTFTSLGAPAAFKFFDKIVDRKRYTSTKEVLNSTLIHQSITGLYETRIDLGKLGED

SEQ ID NO: 65 - protein, 1365 aa, Streptococcus agalactiae
MNKPYSIGLDIGTNSVGYSVVTDDYKVPAKKMRVLGNTDKEYIKKNLIGALLFDGGNTASDRRLKRTARRRYTCRRNRILYLQEIFAEEMSKVDDSFFHRLEDSFLVEDDKRGSKYPIFATMQEEKDYHEKFPTIYHLRKELADKKEKANLRLVYLALAHIIKFRGHFLIEDDSFDVRNTDIQRQYQAFLEIFDTTFENNHLLSQNIDVEGILTDKISKSAKKDRILAQYPNQKSTGIFAEFLKLIVGNQADFKKHFNLEDKTPLQFAKDSYDEDLENLLGQIGDEFADLFSVAKKLYDSVLLSGILTVTDLSTKAPLSASMIQRYDEHREDLKQLKQFVKASLPEKYQEIFTDSSKDGYAGYIEGKTNQGAFYKYLSKLLTKQEGSEYFLEKIKNEDFLRKQRTFDNGSIPHQVHLTELKAIIRRQSEYYPFLKENLDRIEKILTFRIPYYVGPLAREKSDFAWMTRKTDDSIRPWNFEELVDKEASAEAFIHRMTNNDLYLPEEKVLPKHSLIYEKFTVYNELTKVRYKNEQGETYFFDSNIKQEIFDGVFKEHRKVSKKKLLDFLAKEYEEFRIVDVIGLDKENKAFNASLGTYHDLKKILDKDFLDNPDNESILEDIVQTLTLFEDREMIKKRLENYKDLFTESQLKKLYRRHYTGWGRLSAKLINGIRDKESQKTILDYLISDGRANRNFMQLIHDDGLSFKPIIDKAQAGSHSDNLKEVVGELAGSPAIKKGILQSLKIVDELVKVMGYEPEQVVVEMARENQTTNQGRRNTRQRYKLLEEGVKNLASNILKEYPTDNQALQNERLFLYYLQNGRDMYTGEALDIDNLSQYDIDHIVPQAFIKDDSIDNRVLVSSAKNRGKSDNVPSIDIVKARKAFWKKLLDAKLMSQRKYDNLTKAERGGLTSDDKARFIQRQLVETRQITKHVARILDERFNNELDSKGRRIRKVKIVTLKSNLVSNFRKEFGFYKIREVNDYHHAHDAYLNAVVAKAILTKYPQLEPEFVYGDYPKYNSYKTRKATEKLFFYSNIMNFFKTKVTLADGTVVVKDDIEVNNDTGEIVWDKKKHFATVRKVLSYPQVNIVKKTEIQTGGFSKESILAHGNSDKLIPRKTKDIYLDPKKYGGFDSPIVAYSVLVVADIKKGKAQKLKTVTELLGITIMERFRFEKNPSAFLESKGYLNIRDDKLMILPKYSLFELENGRRRLLASAGELQKGNELALPTQYMKFLYLASRYNELKGKPEEIEQKQEFVVQHVSYFDDILQIINDFSNRVILADANLEKINKLYQDNKENISVDELANNIINLFTFTSLGAPAAFKFFDKIVDRKRYTSTKEVLNSTLIHQSITGLYETRIDLGKLGED

SEQ ID NO: 66 - protein, 1365 aa, Streptococcus agalactiae
MNKPYSIGLDIGTNSVGYSVVTDDYKVPAKKMRVLGNTDKEYIKKNLIGALLFDGGNTASDRRLKRTARRRYTRRRNRILYLQEIFAEEMSKVDDSFFHRLEDSFLVEDDKRGSKYPIFATMQEEKDYHEKFPTIYHLRKELADKKEKADLRLVYLALAHIIKFRGHFLIEDDSFDVRNTDIQRQYQAFLEIFDTTFENNHLLSQNIDVEGILTDKISKSAKKDRILAQYPNQKSTGIFAEFLKLIVGNQADFKKHFNLEDKTPLQFAKDSYDEDLENLLGQIGDEFADLFSVAKKLYDSVLLSGILTVTDLSTKAPLSASMIQRYDEHREDLKQLKQFVKASLPEKYQEIFTDSSKDGYAGYIEGKTNQGAFYKYLSKLLTKQEGSEYFLEKIKNEDFLRKQRTFDNGSIPHQVHLTELKAIIRRQSEYYPFLKENLDRIEKILTFRIPYYVGPLAREKSDFAWMTRKTDDSIRPWNFEELVDKEASAEAFIHRMTNNDLYLPEEKVLPKHSLIYEKFTVYNELTKVRYKNEQGETYFFDSNIKQEIFDGVFKEHRKVSKKKLLDFLAKEYEEFRIVDVIGLDKENKAFNASLGTYHDLKKILDKDFLDNPDNESILEDIVQTLTLFEDREMIKKRLENYKDLFTESQLKKLYRRHYTGWGRLSAKLINGIRDKESQKTILDYLISDGRANRNFMQLIHDDGLSFKPIIDKAQAGSHSDNLKEVVGELAGSPAIKKGILQSLKIVDELVKVMGYEPEQVVVEMARENQTTNQGRRNTRQRYKLLEEGVKNLASNILKEYPTDNQALQNERLFLYYLQNGRDMYTGEALDIDNLSQYDIDHIVPQAFIKDDSIDNRVLVSSAKNRGKSDNVPSIDIVKARKAFWKKLLDAKLMSQRKYDNLTKAERGGLTSDDKARFIQRQLVETRQITKHVARILDERFNNELDSKGRRIRKVKIVTLKSNLVSNFRKEFGFYKIREVNDYHHAHDAYLNAVVAKAILTKYPQLEPEFVYGDYPKYNSYKTRKATEKLFFYSNIMNFFKTKVTLADGTVVVKDDIEVNNDTGEIVWDKKKHFATVRKVLSYPQVNIVKKTEIQTGGFSKESILAHGNSDKLIPRKTKDIYLDPKKYGGFDSPIVAYSVLVVADIKKGKAQKLKTVTELLGITIMERFRFEKNPSAFLESKGYLNIRDDKLMILPKYSLFELENGRRRLLASAGELQKGNELALPTQYMKFLYLASRYNELKGKPEEIEQKQEFVVQHVSYFDDILQIINDFSNRVILADANLEKINKLYQDNKENISVDELANNIINLFTFTSLGAPAAFKFFDKIVDRKRYTSTKEVLNSTLIHQSITGLYETRIDLGKLGED

SEQ ID NO: 67 - protein, 1365 aa, Streptococcus agalactiae
MNKPYSIGLDIGTNSVGYSVVTDDYKVPAKKMRVLGNTDKEYIKKNLIGALLFDGGNTASDRRLKRTARRRYTRRRNRILYLQEIFAEEMSKVDDSFFHRLEDSFLVEDDKRGSKYPIFATMQEEKDYHEKFPTIYHLRKELADKKEKADLRLVYLALAHIIKFRGHFLIEDDSFDVRNTDIQRQYQAFLEIFDTTFENNHLLSQNIDVEGILTDKISKSAKKDRILAQYPNQKSTGIFAEFLKLIVGNQADFKKHFNLEDKTPLQFAKDSYDEDLENLLGQIGDEFADLFSVAKKLYDSVLLSGILTVTDLSTKAPLSASMIQRYDEHREDLKQLKQFVKASLPEKYQEIFTDSSKDGYAGYIEGKTNQGAFYKYLSKLLTKQEGSEYFLEKIKNEDFLRKQRTFDNGSIPHQVHLTELKAIIRRQSEYYPFLKENLDRIEKILTFRIPYYVGPLAREKSDFAWMTRKTDDSIRPWNFEELVDKEASAEAFIHRMTNNDLYLPEEKVLPKHSLIYEKFTVYNELTKVRYKNEQGETYFFDSNIKQEIFDGVFKEHRKVSKKKLLDFLAKEYEEFRIVDVIGLDKENKAFNASLGTYHDLKKILDKDFLDNPDNESILEDIVQTLTLFEDREMIKKRLENYKDLFTESQLKKLYRRHYTGWGRLSAKLINGIRDKESQKTILDYLISDGRANRNFMQLIHDDGLSFKPIIDKAQAGSHSDNLKEVVGELAGSPAIKKGILQSLKIVDELVKVMGYEPEQVVVEMARENQTTNQGRRNTRQRYKLLEEGVKNLASNILKEYPTDNQALQNERLFLYYLQNGRDMYTGETLDIDNLSQYDIDHIVPQAFIKDDSIDNRVLVSSAKNRGKSDNVPSIDIVKARKAFWKKLLDAKLMSQRKYDNLTKAERGGLTSDDKARFIQRQLVETRQITKHVARILDERFNNELDSKGRRIRKVKIVTLKSNLVSNFRKEFGFYKIREVNDYHHAHDAYLNAVVAKAILTKYPQLEREFVYGDYPKYNSYKTRKATEKLFFYSNIMNFFKTKVTLADGTVVVKDDIEVNNDTGEIVWDKKKHFATVRKVLSYPQVNIVKKTEIQTGGFSKESILAHGNSDKLIPRKTKDIYLDPKKYGGFDSPIVAYSVLVVADIKKGKAQKLKTVTELLGITIMERFRFEKNPSAFLESKGYLNIRDDKLMILPKYSLFELENGRRRLLASAGELQKGNELALPTQYMKFLYLASRYNELKGKPEEIEQKQEFVVQHVSYFDDILQIINDFSNRVILADANLEKINKLYQDNKENISVDELANNIINLFTFTSLGAPAAFKFFDKIVDRKRYTSTKEVLNSTLIHQSITGLYETRIDLGKLGED

SEQ ID NO: 68 - protein, 1365 aa, Streptococcus agalactiae
MNKPYSIGLDIGTNSVGYSVVTDDYKVPAKKMRVLGNTDKEYIKKNLIGALLFDGGNTASDRRLKRTARRRYTRRRNRILYLQEIFAEEMSKVDDSFFHRLEDSFLVEDDKRGSKYPIFATMQEEKDYHEKFPTIYHLRKELADKKEKANLRLVYLALAHIIKFRGHFLIEDDSFDVRNTDIQRQYQAFLEIFDTTFENNHLLSQNIDVEGILTDKISKSAKKDRILAQYPNQKSTGIFAEFLKLIVGNQADFKKHFNLEDKTPLQFAKDSYDEDLENLLGQIGDEFADLFSVAKKLYDSVLLSGILTVTDLSTKAPLSASMIQRYDEHREDLKQLKQFVKASLPEKYQEIFTDSSKDGYAGYIEGKTNQGAFYKYLSKLLTKQEGSEYFLEKIKNEDFLRKQRTFDNGSIPHQVHLTELKAIIRRQSEYYPFLKENLDRIEKILTFRIPYYVGPLAREKSDFAWMTRKTDDSIRPWNFEELVDKEASAEAFIHRMTNNDLYLPEEKVLPKHSLIYEKFTVYNELTKVRYKNEQGETYFFDSNIKQEIFDGVFKEHRKVSKKKLLDFLAKEYEEFRIVDVIGLDKENKAFNASLGTYHDLKKILDKDFLDNPDNESILEDIVQTLTLFEDREMIKKRLENYKDLFTESQLKKLYRRHYTGWGRLSAKLINGIRDKESQKTILDYLISDGRANRNFMQLIHDDGLSFKPIIDKAQAGSHSDNLKEVVGELAGSPAIKKGILQSLKIVDELVKVMGYEPEQVVVEMARENQTTNQGRRNTRQRYKLLEEGVKNLASNILKEYPTDNQALQNERLFLYYLQNGRDMYTGEALDIDNLSQYDIDHIVPQAFIKDDSIDNRVLVSSAKNRGKSDNVPSIDIVKARKAFWKKLLDAKLMSQRKYDNLTKAERGGLTSDDKARFIQRQLVETRQITKHVARILDERFNNELDSKGRRIRKVKIVTLKSNLVSNFRKEFGFYKIREVNDYHHAHDAYLNAVVAKAILTKYPQLEPEFVYGDYPKYNSYKTRKATEKLFFYSNIMNFFKTKVTLADGTVVVKDDIEVNNDTGEIVWDKKKHFATVRKVLSYPQVNIVKKTEIQTGGFSKESILAHGNSDKLIPRKTKDIYLDPKKYGGFDSPIVAYSVLVVADIKKGKAQKLKTVTELLGITIMERFRFEKNPSAFLESKGYLNIRDDKLMILPKYSLFELENGRRRLLASAGELQKGNELALPTQYMKFLYLASRYNELKGKPEEIEQKQEFVVQHVSYFDDILQIINDFSNRVILADANLEKINKLYQDNKENISVDELANNIINLFTFTSLGAPAAFKFFDKIVDRKRYTSTKEVLNSTLIHQFITGLYETRIDLGKLGED

SEQ ID NO: 69 - protein, 1365 aa, Streptococcus agalactiae
MNKPYSIGLDIGTNSVGYSVVTDDYKVPAKKMRVLGNTDKEYIKKNLIGALLFDGGNTASDRRLKRTARRRYTRRRNRILYLQEIFAEEMSKVDDSFFHRLEDSFLVEDDKRGSKYPIFATMQEEKDYHEKFPTIYHLRKELADKKEKANLRLVYLALAHIIKFRGHFLIEDDSFDVRNTDIQRQYQAFLEIFDTTFENNHLLSQNIDVEGILTDKISKSAKKDRILAQYPNQKSTGIFAEFLKLIVGNQADFKKHFNLEDKTPLQFAKDSYDEDLENLLGQIGDEFADLFSVAKKLYDSVLLSGILTVTDLSTKAPLSASMIQRYDEHREDLKQLKQFVKASLPEKYQEIFTDSSKDGYAGYIEGKTNQGAFYKYLSKLLTKQEGSEYFLEKIKNEDFLRKQRTFDNGSIPHQVHLTELKAIIRRQSEYYPFLKENLDRIEKILTFRIPYYVGPLAREKSDFAWMTRKTDDSIRPWNFEELVDKEASAEAFIHRMTNNDLYLPEEKVLPKHSLIYEKFTVYNELTKVRYKNEQGETYFFDSNIKQEIFDGVFKEHRKVSKKKLLDFLAKEYEEFRIVDVIGLDKENKAFNASLGTYHDLKKILDKDFLDNPDNESILEDIVQTLTLFEDREMIKKRLENYKDLFTESQLKKLYRRHYTGWGRLSAKLINGIRDKESQKTILDYLISDGRANRNFMQLIHDDGLSFKPIIDKAQAGSHSDNLKEVVGELAGSPAIKKGILQSLKIVDELVKVMGYEPEQVVVEMARENQTTNQGRRNTRQRYKLLEEGVKNLASNILKEYPTDNQALQNERLFLYYLQNGRDMYTGEALDIDNLSQYDIDHIVPQAFIKDDSIDNRVLVSSAKNRGKSDNVPSIDIVKARKAFWKKLLDAKLMSQRKYDNLTKAERGGLTSDDKARFIQRQLVETRQITKHVARILDERFNNELDSKGRRIRKVKIVTLKSNLVSNFRKEFGFYKIREVNDYHHAHDAYLNAVVAKAILTKYPQLEPEFVYGDYPKYNSYKTRKATEKLFFYSNIMNFFKTKVTLADGTVVVKDDIEVNNDTGEIVWDKKKHFATVRKVLSYPQVNIVKKTEIQTGGFSKESILAHGNSDKLIPRKTKDIYLDPKKYGGFDSPIVAYSVLVVADIKKGKAQKLKTVTELLGITIMERFRFEKNPSAFLESKGYLNIRDDKLMILPKYSLFELENGRRRLLASAGELQKGNELALPTQYMKFLYLASRYNELKGKPEEIEQKQEFVVQHVSYFDDILQIINDFSNRVILADANLEKINKLYQDNKENISVDELANNIINLFTFTSLGAPAAFKFFDKIVDRKRYTSTKEVLNSTLIHQSITGLYETRIDLGKLGED

SEQ ID NO: 70 - protein, 1365 aa, Streptococcus agalactiae
MNKPYSIGLDIGTNSVGWSIITDDYKVPAKKMRVLGNTDKEYIKKNLIGALLFDGGNTAADRRLKRTARRRYTRRRNRILYLQEIFAEEMSKVDDSFFHRLEDSFLVEEDKRGSKYPIFATMQEEKDYHEKFPTIYHLRKELADKKEKADLRLVYLALAHIIKFRGHFLIEDDRFDVRNTDIQKQYQAFLEIFDTSFENNHLLSQNVDVEAILTDKISKSAKKDRILAQYPNQKSTGIFAEFLKLIVGNQADFKKHFNLEDKTPLQFAKDSYDEDLENLLGQIGDEFADLFSAAKKLYDSVLLSGILTVTDLSTKAPLSASMIQRYDEHREDLKQLKQFVKASLPEKYQEIFADSSKDGYAGYIEGKTNQEAFYKYLSKLLTKQEDSEYFLEKIKNEDFLRKQRTFDNGSIPHQVHLTELKAIIRRQSEYYPFLKENQDKIEKILTFRIPYYVGPLARGNSDFAWMTRKTDDSIRPWNFEDLVDKEKSAEAFIHRMTNNDLYLPEEKVLPKHSLIYEKFTVYNELTKVRYKNEQGETYFFDSNVKQEIFDGVFKEHRKVSKKQLLDFLAKEFEEFRIVDVTGLDKENKAFNASLGTYHDLKKILDKDFLDNPDNESILEDIVQTITLFEDREMIKKRLENYKDLFTESQLKKLYRRHYTGWGRLSAKLINGIRDRESQKTILDYLISDGRANRNFMQLINDDGLSFKSIISKAQSGSHSDNLKEVVGELAGSPAIKKGILQSLKIVDELVKVMGYEPEQIVVEMARENQTTNQGRRNSRQRYKLLEDGVKNLASDILKEYPTDNQALQNERLFLYYLQNGRDMYTGEALDIDNLSQYDIDHIVPQAFIKDDSIDNRVLVSSAKNRGKSDDVPSIDIVKARKAFWKKLLDAKLISQRKYDNLTKAERGGLTPDDKAGFIQRQLVETRQITKHVARILDERFNNKVDDNNKPIRKVKIVTLKSNLVSNFRKEFGFYKIREVNNYHHAHDAYLNAVVAKAILTKYPQLEPEFVYGDYPKYNSYKTRKATEKLFFYSNIMNFFKTKVTLADETVVVKDDIEVNNETGEIAWDKKKHFATVRKVLSYPQVNIVKKTEVQTGGFSKESILAHSNSDKLIPRKTKDIYLDPKKYGGFDSPIVAYSVLVLADIKKGKAQKLKTVKELIGITIMERERFEKNPSAFLESKGYLNIRTDKLIILPKYSLFELENGRRRLLASAGELQKGNELALPTQYMKFLYLASRYNESKGKPEEIEKKQEFVNQHVSYFDDILQLINDFSKRVILADANLEKINKLYSDNKDNTPVDELAKNIINLFTFTSLGAPAAFKFFDKSVDRKRYTSTKEVLDSTLIHQSITGLYETRIDLGKLGED

SEQ ID NO: 71 - protein, 1365 aa, Streptococcus agalactiae
MNKPYSIGLDIGTNSVGWSIITDDYKVPAKKMRVLGNTDKEYIKKNLIGALLFDGGNTAADRRLKRTARRRYTRRRNRILYLQEIFAEEMSKVDDSFFHRLEDSFLVEEDKRGSKYPIFATMQEEKYYHEKFPTIYHLRKELADKKEKADLRLIYLALAHIIKFRGHFLIEDDRFDVRNTDIQKQYQAFLEIFDTTFENNDLLSQNVDVEAILTDKISKSAKKDRILARYPNQKSTGIFAEFLKLIVGNQADFKKHFNLEDKTPLQFAKDSYDEDLENLLGQIGDEFADLFSAAKKLYDSVLLSGILTVTDLSTKAPLSASMIQRYDEHREDLKQLKQFVKASLPEKYQEIFADSSKDGYAGYIEGKTNQEAFYKYLSKLLTKQEGSEYLLEKIKNEDFLRKQRTFDNGSIPHQVHLTELRAIIRRQSEYYPFLKENLDRIEKILTFRIPYYVGPLAREKSDFAWMTRKTDDSIRPWNFEDLVDKEKSAEAFIHRMTNNDLYLPEEKVLPKHSLIYEKFTVYNELTKVRFLAEGFKDFQFLNRKQKETIFNSLFKEKRKVTEKDIISFLNKVDGYEGIAIKGIEKQFNASLSTYHDLKKILGKDFLDNTDNELILEDIVQTLTLFEDREMIRKRLDIYKDFFTESQLKKLYRRHYTGWGRLSAKLINGIRNKENQKTILDYLIDDGSANRNFMQLIKDAGLSFKPIIDKARTGSHSDNLKEVVGELAGSPAIKKGILQSLKIVDELVKVMGYEPEQIVVEMARENQTTAKGLSRLRQRLTTLRESLANLKSEKKPKYVKDQVENHHLSDDRLFLYYLQNGKDMYTDDELDIDNLSQYDIDLIIPQAFIKDDSIDNRVLVSSAKNRGKSDDVPSVEIVKDCKVFWKKLLDAKLMSQRKYDNLTKAERGGLTSDDKARFIQRQLVETRQITKHVARILDERFNNELDSKGRRIRKVKIVTLKSNLVSNFRKEFGFYKIREVNNYHHAHDAYLNAVVAKAILTKYPQLEPEFVYGDYPKYNSYKTRKATEKLFFYSNIMNFFKTKVTLADGTVVVKDDIEVNNDTGEIVWDKKKHFATVRKVLSYPQVNIVKKTEIQTGGFSKESILAHGNSDKLIPRKTKDIYLDPKKYGGFDSPIVAYSVLVVADIKKGKAQKLKTVTELLGITIMERSRFEKNPSAFLESKGYLNIRDDKLMILPKYSLFELENGRRRLLASADELQKGNELALPTQFMKFLYLASRYNELKGKPEEIEQKQEFVVQHVSYFDDILQIINDFSNRVILADANLEKINKLYQDNKENIPVDELANNIINLFTFTSLGAPAAFKFFDKIVDRKRYTSTKEVLNSTLIHQSITGLYETRIDLGKLGED

SEQ ID NO: 72 - protein, 1365 aa, Streptococcus agalactiae
MNKPYSIGLDIGTNSVGWSIITDDYKVPAKKMRVLGNTDKEYIKKNLIGALLFDGGNTASDRRLKRTARRRYTRRRNRILYLQEIFAEEMSKVDDSFFHRLEDSFLVEDDKRGSKYPIFATMQEEKDYHEKFPTIYHLRKELADKKEKADLRLFYLALAHIIKFRGHFLIEDDSFDVRNTDIQRQYQAFLEIFDTTFENNHLLSQNIDIEGILTDKISKSAKKDRILAQYPNQKSTGIFAEFLKLIVGNQADFKKHFNLEDKTPLQFAKDSYDEDLENLLGQIGDEFADLFSVAKKLYDSVLLSGILTVTDLSTKAPLSASMIQRYDEHREDLKQLKQFVKASLPEKYQEIFTDSSKDGYAGYIEGKTNQGAFYKYLSKLLTKQEGSEYFLEKIKNEDFLRKQRTFDNGSIPHQVHLTELKAIIRRQSEYYPFLKENLDRIEKILTFRIPYYVGPLAREKSDFAWMTRKTDDSIRPWNFEELVDKEASAEAFIHRMTNNDLYLPEEKVLPKHSLIYEKFTVYNELTKVRYKNEQGETYFFDSNIKQEIFDGVFKEHRKVSKKKLLDFLAKEYEEFRIVDVIGLDKENKAFNASLGTYHDLKKILDKDFLDNPDNESILEDIVQTLTLFEDREMIKKRLENYKDLFTESQLKKLYRRHYTGWGRLSAKLINGIRDKESQKTILDYLIDDGKSNRNFMQLIHDDGLSFKSIISKAQAGSHSDNLKEVVGELAGSPAIKKGILQSLKIVDELVKVMGYEPEQIVVEMARENQTTNQGRRNSRQRYKLLDDGVKNLASNILKEYPTDNQALQNERLFLYYLQNGRDMYTGKALDIDNLSQYDIDHIIPQAFIKDDSIDNRVLVSSAKNRGKSDDVPSLEIVKDCKVFWKKLLDAKLMSQRKYDNLTKAERGGLTSDDKARFIQRQLVETRQITKHVARILDERFNNELDSKGRRIRKVKIVTLKSNLVSNFRKEFGFYKIREVNNYHHAHDAYLNAVVAKAILTKYPQLEPEFVYGDYPKYNSYKTRKATEKLFFYSNIMNFFKTKVTLADGTVVVKDDIEVNNDTGEIVWDKKKHFATVRKVLSYPQVNIVKKTEIQTGGFSKESILAHGNSDKLIPRKTKDIYLDPKKYGGFDSPIVAYSVLVVADIKKGKAQKLKTVTELLGITIMERSRFEKNPSAFLESKGYLNIRDDKLMILPKYSLFELENGRRRLLASAGELQKGNELALPTQFMKFLYLASRYNELKGKPEEIEQKQEFVVQHVSYFDDILQIINDFSNRVILADANLEKINKLYQDNKENISVDELANNIINLFTFTSLGAPAAFKFFDKIVDRKRYTSTKEVLNSTLIHQSITGLYETRIDLGKLGED

SEQ ID NO: 73 - protein, 1365 aa, Streptococcus agalactiae
MNKPYSIGLDIGTNSVGWSIITDDYKVPAKKMRVLGNTDKEYIKKNLIGALLFDGGNTASDRRLKRTARRRYTRRRNRILYLQEIFAEEMSKVDDSFFHRLEDSFLVEDDKRGSKYPIFATMQEEKDYHEKFPTIYHLRKELADKKEKADLRLFYLALAHIIKFRGHFLIEDDSFDVRNTDIQRQYQAFLEIFDTTFENNHLLSQNIDVEGILTDKISKSAKKDRILAQYPNQKSTGIFAEFLKLIVGNQADFKKHFNLEDKTPLQFAKDSYDEDLENLLGQIGDEFADLFSVAKKLYDSVLLSGILTVTDLSTKAPLSASMIQRYDEHREDLKQLKQFVKASLPEKYQEIFTDSSKDGYAGYIEGKTNQGAFYKYLSKLLTKQEGSEYFLEKIKNEDFLRKQRTFDNGSIPHQVHLTELKAIIRRQSEYYPFLKENLDRIEKILTFRIPYYVGPLAREKSDFAWMTRKTDDSIRPWNFEELVDKEASAEAFIHRMTNNDLYLPEEKVLPKHSLIYEKFTVYNELTKVRYKNEQGETYFFDSNIKQEIFDGVFKEHRKVSKKKLLDFLAKEYEEFRIVDVIGLDKENKAFNASLGTYHDLKKILDKDFLDNPDNESILEDIVQTLTLFEDREMIKKRLENYKDLFTESQLKKLYRRHYTGWGRLSAKLINGIRDKESQKTILDYLIDDGKSNRNFMQLIHDDGLSFKSIISKAQAGSHSDNLKEVVGELAGSPAIKKGILQSLKIVDELVKVMGYEPEQIVVEMARENQTTNQGRRNSRQRYKLLDDGVKNLASNILKEYPTDNQALQNERLFLYYLQNGRDMYTGKALDIDNLSQYDIDHIIPQAFIKDDSIDNRVLVSSAKNRGKSDDVPSLEIVKDCKVFWKKLLDAKLMSQRKYDNLTKAERGGLTSDDKARFIQRQLVETRQITKHVARILDERFNNELDSKGRRIRKVKIVTLKSNLVSNFRKEFGFYKIREVNNYHHAHDAYLNAVVAKAILTKYPQLEPEFVYGDYPKYNSYKTRKATEKLFFYSNIMNFFKTKVTLADGTVVVKDDIEVNNDTGEIVWDKKKHFATVRKVLSYPQVNIVKKTEIQTGGFSKESILAHGNSDKLIPRKTKDIYLDPKKYGGFDSPIVAYSVLVVADIKKGKAQKLKTVTELLGITIMERSRFEKNPSAFLESKGYLNIRDDKLMILPKYSLFELENGRRRLLASAGELQKGNELALPTQFMKFLYLASRYNELKGKPEEIEQKQEFVVQHVSYFDDILQIINDFSNRVILADANLEKINKLYQDNKENISVDELANNIINLFTFTSLGAPAAFKFFDKIVDRKRYTSTKEVLNSTLIHQSITGLYETRIDLGKLGED

SEQ ID NO: 74 - protein, 1365 aa, Streptococcus agalactiae
MNKPYSIGLDIGTNSVGWSIITDDYKVPAKKMRVLGNTDKEYIKKNLIGALLFDGGNTAADRRLKRTARRRYTRRRNRILYLQEIFAEEMSKVDDSFFHRLEDSFLVEEDKRGSKYPIFATLQEEKDYHEKFPTIYHLRKELADKKEKADLRLIYIALAHIIKFRGHFLIEDDSFDVRNTDISKQYQDFLEIFNTTFENNDLLSQNVDVEAILTDKISKSAKKDRILAQYPNQKSTGIFAEFLKLIVGNQADFKKYFNLEDKTPLQFAKDSYDEDLENLLGQIGDEFADLFSAAKKLYDSVLLSGILTVIDLSTKAPLSASMIQRYDEHREDLKQLKQFVKASLPEKYQEIFADSSKDGYAGYIEGKTNQEAFYKYLSKLLTKQEDSENFLEKIKNEDFLRKQRTFDNGSIPHQVHLTELKAIIRRQSEYYPFLKENQDRIEKILTFRIPYYIGPLAREKSDFAWMTRKTDDSIRPWNFEDLVDKEKSAEAFIHRMTNNDFYLPEEKVLPKHSLIYEKFTVYNELTKVRYKNEQGETYFFDSNIKQEIFDGVFKEHRKVSKKKLLDFLAKEYEEFRIVDVIGLDKENKAFNASLGTYHDLEKILDKDFLDNPDNESILEDIVQTLTLFEDREMIKKRLENYKDLFTESQLKKLYRRHYTGWGRLSAKLINGIRDKESQKTILDYLIDDGRSNRNFMQLINDDGLSFKSIISKAQAGSHSDNLKEVVGELAGSPAIKKGILQSLKIVDELVKVMGYEPEQIVVEMARENQTTNQGRRNSRQRYKLLDDGVKNLASNILKEYPTDNQALQNERLFLYYLQNGRDMYTGEALDIDNLSQYDIDHIIPQAFIKDDSIDNRVLVSSAKNRGKSDDVPSLEIVKDCKVFWKKLLDAKLMSQRKYDNLTKAERGGLTSDDKARFIQRQLVETRQITKHVARILDERFNNELDSKGRRIRKVKIVTLKSNLVSNFRKEFGFYKIREVNNYHHAHDAYLNAVVAKAILTKYPQLEPEFVYGDYPKYNSYKTRKATEKLFFYSNIMNFFKTKVTLADGTVVVKDDIEVNNDTGEIVWDKKKHFATVRKVLSYPQNNIVKKTEIQTGGFSKESILAHGNSDKLIPRKTKDIYLDPKKYGGFDSPIVAYSVLVVADIKKGKAQKLKTVTELLGITIMERSRFEKNPSAFLESKGYLNIRADKLIILPKYSLFELENGRRRLLASAGELQKGNELALPTQFMKFLYLASRYNESKGKPEEIEKKQEFVNQHVSYFDDILQLINDFSKRVILADANLEKINKLYQDNKENISVDELANNIINLFTFTSLGAPAAFKFFDKIVDRKRYTSTKEVLNSTLIHQSITGLYETRIDLGKLGED

SEQ ID NO: 75 - protein, 1365 aa, Streptococcus agalactiae
MNKPYSIGLDIGTNSVGYSVVTDDYKVPAKKMRVLGNTDKEYIKKNLIGALLFDGGNTASDRRLKRTARRRYTRRRNRILYLQEIFAEEMSKVDDSFFHRLEDSFLVEDDKRGSKYPIFATMQEEKDYHEKFPTIYHLRKELADKKEKADLRLVYLALAHIIKFRGHFLIEDDSFDVRNTDIQRQYQAFLEIFDTTFENNHLLSQNIDVEGILTDKISKSAKKDRILAQYPNQKSTGIFAEFLKLIVGNQADFKKHFNLEDKTPLQFAKDSYDEDLENLLGQIGDEFADLFSVAKKLYDSVLLSGILTVTALSTKAPLSASMIQRYDEHREDLKQLKQFVKASLPEKYQEIFTDSSKDGYAGYIEGKTNQGAFYKYLSKLLTKQEGSEYFLEKIKNEDFLRKQRTFDNGSIPHQVHLTELKAIIRRQSEYYPFLKENLDRIEKILTFRIPYYVGPLAREKSDFAWMTRKTDDSIRPWNFEELVDKEASAEAFIHRMTNNDLYLPEEKVLPKHSLIYEKFTVYNELTKVRYKNEQGETYFFDSNIKQEIFDGVFKEHRKVSKKKLLDFLAKEYEEFRIVDVIGLDKENKAFNASLGTYHDLKKILDKDFLDNPDNESILEDIVQTLTLFEDREMIKKRLENYKDLFTESQLKKLYRRHYTGWGRLSAKLINGIRDKESQKTILDYLISDGRANRNFMQLIHDDGLSFKPIIDKAQAGSHSDNLKEVVGELAGSPAIKKGILQSLKIVDELVKVMGYEPEQVVVEMARENQTTNQGRRNTRQRYKLLEEGVKNLASNILKEYPTDNQALQNERLFLYYLQNGRDMYTGEALDIDNLSQYDIDHIVPQAFIKDDSIDNRVLVSSAKNRGKSDNVPSIDIVKARKAFWKKLLDAKLMSQRKYDNLTKAERGGLTSDDKARFIQRQLVETRQITKHVARILDERFNNELDSKGRRIRKVKIVTLKSNLVSNFRKEFGFYKIREVNDYHHAHDAYLNAVVAKAILTKYPQLEPEFVYGDYPKYNSYKTRKATEKLFFYSNIMNFFKTKVTLADGTVVVKDDIEVNNDTGEIVWDKKKHFATVRKVLSYPQVNIVKKTEIQTGGFSKESILAHGNSDKLIPRKTKDIYLDPKKYGGFDSPIVAYSVLVVADIKKGKAQKLKTVTELLGITIMERFRFEKNPSAFLESKGYLNIRDDKLMILPKYSLFELENGRRRLLASAGELQKGNELALPTQYMKFLYLASRYNELKGKPEEIEQKQEFVVQHVSYFDDILQIINDFSNRVILADANLEKINKLYQDNKENISVDELANNIINLFTFTSLGAPAAFKFFDKIVDRKRYTSTKEVLNSTLIHQSITGLYETRIDLGKLGED

SEQ ID NO: 76 - protein, 1365 aa, Streptococcus agalactiae
MNKPYSIGLDIGTNSVGWSIITDDYKVPAKKMRVLGNTDKEYIKKNLIGALLFDGGNTAADRRLKRTARRRYTRRRNRILYLQEIFAEEMSKVDDSFFHRLEDSFLVEEDKRGSKYPIFATLQEEKDYHEKFSTIYHLRKELADKKEKADLRLIYIALAHIIKFRGHFLIEDDSFDVRNTDISKQYQDFLEIFNTTFENNDLLSQNVDVEAILTDKISKSAKKDRILAQYPNQKSTGIFAEFLKLIVGNQADFKKYFNLEDKTPLQFAKDSYDEDLENLLGQIGDEFADLFSAAKKLYDSVLLSGILTVIDLSTKAPLSASMIQRYDEHREDLKQLKQFVKASLPEKYQEIFADSSKDGYAGYIEGKTNQEAFYKYLSKLLTKQEDSENFLEKIKNEDFLRKQRTFDNGSIPHQVHLTELKAIIRRQSEYYPFLKENQDRIEKILTFRIPYYIGPLAREKSDFAWMTRKTDDSIRPWNFEDLVDKEKSAEAFIHRMTNNDFYLPEEKVLPKHSLIYEKFTVYNELTKVRYKNEQGETYFFDSNIKQEIFDGVFKEHRKVSKKKLLDFLAKEYEEFRIVDVIGLDKENKAFNASLGTYHDLEKILDKDFLDNPDNESILEDIVQTLTLFEDREMIKKRLENYKDLFTESQLKKLYRRHYTGWGRLSAKLINGIRDKESQKTILDYLIDDGRSNRNFMQLINDDGLSFKSIISKAQAGSHSDNLKEVVGELAGSPAIKKGILQSLKIVDELVKVMGYEPEQIVVEMARENQTTNQGRRNSRQRYKLLDDGVKNLASNILKEYPTDNQALQNERLFLYYLQNGRDMYTGEALDIDNLSQYDIDHIIPQAFIKDDSIDNRVLVSSAKNRGKSDDVPSLEIVKDCKVFWKKLLDAKLMSQRKYDNLTKAERGGLTSDDKARFIQRQLVETRQITKHVARILDERFNNELDSKGRRIRKVKIVTLKSNLVSNFRKEFGFYKIREVNNYHHAHDAYLNAVVAKAILTKYPQLEPEFVYGDYPKYNSYKTRKATEKLFFYSNIMNFFKTKVTLADGTVVVKDDIEVNNDTGEIVWDKKKHFATVRKVLSYPQNNIVKKTEIQTGGFSKESILAHGNSDKLIPRKTKDIYLDPKKYGGFDSPIVAYSVLVAADIKKGKAQKLKTVTELLGITIMERSRFEKNPSAFLESKGYLNIRADKLIILPKYSLFELENGRRRLLASAGELQKGNELALPTQFMKFLYLASRYNESKGKPEEIEKKQEFVNQHVSYFDDILQLINDFSKRVILADANLEKINKLYQDNKENISVDELANNIINLFTFTSLGAPAAFKFFDKIVDRKRYTSTKEVLNSTLIHQSITGLYETRIDLGKLGED

SEQ ID NO: 77 - protein, 1365 aa, Streptococcus agalactiae
MNKPYSIGLDIGTNSVGWSIITDDYKVPAKKMRVLGNTDKEYIKKNLIGALLFDGGNTAADRRLKRTARRRYTRRRNRILYLQEIFAEEMSKVDDSFFHRLEDSFLVEEDKRGSKYPIFATLQEEKDYHEKFSTIYHLRKELADKKEKADLRLIYIALAHIIKFRGHFLIEDDSFDVRNTDISKQYQDFLEIFNTTFENNDLLSQNVDVEAILTDKISKSAKKDRILAQYPNQKSTGIFAEFLKLIVGNQADFKKYFNLEDKTPLQFAKDSYDEDLENLLGQIGDEFADLFSAAKKLYDSVLLSGILTVIDLSTKASLSDSMIQRYDEHREDLKQLKQFVKASLPEKYQEIFADSSKDGYAGYIEGKTNQEAFYKYLSKLLTKQEDSENFLEKIKNEDFLRKQRTFDNGSIPHQVHLTELKAIIRRQSEYYPFLKENQDRIEKILTFRIPYYIGPLAREKSDFAWMTRKTDDSIRPWNFEDLVDKEKSAEAFIHRMTNNDFYLPEEKVLPKHSLIYEKFTVYNELTKVRYKNEQGETYFFDSNIKQEIFDGVFKEHRKVSKKKLLDFLAKEYEEFRIVDVIGLDKENKAFNASLGTYHDLEKILDKDFLDNPDNESILEDIVQTLTLFEDREMIKKRLENYKDLFTESQLKKLYRRHYTGWGRLSAKLINGIRDKESQKTILDYLIDDGRSNRNFMQLINDDGLSFKSIISKAQAGSHSDNLKEVVGELAGSPAIKKGILQSLKIVDELVKVMGYEPEQIVVEMARENQTTNQGRRNSRQRYKLLDDGVKNLASNILKEYPTDNQALQNERLFLYYLQNGRDMYTGEALDIDNLSQYDIDHIIPQAFIKDDSIDNRVLVSSAKNRGKSDDVPSLEIVKDCKVFWKKLLDAKLMSQRKYDNLTKAERGGLTSDDKARFIQRQLVETRQITKHVARILDERFNNELDSKGRRIRKVKIVTLKSNLVSNFRKEFGFYKIREVNNYHHAHDAYLNAVVAKAILTKYPQLEPEFVYGDYPKYNSYKTRKATEKLFFYSNIMNFFKTKVTLADGTVVVKDDIEVNNDTGEIVWDKKKHFATVRKVLSYPQNNIVKKTEIQTGGFSKESILAHGNSDKLIPRKTKDIYLDPKKYGGFDSPIVAYSVLVVADIKKGKAQKLKTVTELLGITIMERSRFEKNPSAFLESKGYLNIRADKLIILPKYSLFELENGRRRLLASAGELQKGNELALPTQFMKFLYLASRYNESKGKPEEIEKKQEFVNQHVSYFDDILQLINDFSKRVILADANLEKINKLYQDNKENISVDELANNIINLFTFTSLGAPAAFKFFDKIVDRKRYTSTKEVLNSTLIHQSITGLYETRIDLGKLGED

SEQ ID NO: 78 - protein, 1365 aa, Streptococcus agalactiae
MNKPYSIGLDIGTNSVGWSIITDDYKVPAKKMRVLGNTDKEYIKKNLIGALLFDGGNTAADRRLKRTARRRYTRRRNRILYLQEIFAEEMSKVDDSFFHRLEDSFLVEEDKRGSKYPIFATLQEEKDYHEKFSTIYHLRKELADKKEKADLRLIYIALAHIIKFRGHFLIEDDSFDVRNTDISKQYQDFLEIFNTTFENNDLLSQNVDVEAILTDKISKSAKKDRILAQYPNQKSTGIFAEFLKLIVGNQADFKKYFNLEDKTPLQFAKDSYDEDLENLLGQIGDEFADLFSAAKKLYDSVLLSGILTVIDLSTKAPLSASMIQRYDEHREDLKQLKQFVKASLPEKYQEIFADSSKDGYAGYIEGKTNQEAFYKYLSKLLTKQEDSENFLEKIKNEDFLRKQRTFDNGSIPHQVHLTELKAIIRRQSEYYPFLKENQDRIEKILTFRIPYYIGPLAREKSDFAWMTRKTDDSIRPWNFEDLVDKEKSAEAFIHRMTNNDFYLPEEKVLPKHSLIYEKFTVYNELTKVRYKNEQGETYFFDSNIKQEIFDGVFKEHRKVSKKKLLDFLAKEYEEFRIVDVIGLDKENKAFNASLGTYHDLEKILDKDFLDNPDNESILEDIVQTLTLFEDREMIKKRLENYKDLFTESQLKKLYRRHYTGWGRLSAKLINGIRDKESQKTILDYLIDDGRSNRNFMQLINDDGLSFKSIISKAQAGSHSDNLKEVVGELAGSPAIKKGILQSLKIVDELVKVMGYEPEQIVVEMARENQTTNQGRRNSRQRYKLLDDGVKNLASNILKEYPTDNQALQNERLFLYYLQNGRDMYTGEALDIDNLSQYDIDHIIPQAFIKDDSIDNRVLVSSAKNRGKSDDVPSLEIVKDCKVFWKKLLDAKLMSQRKYDNLTKAERGGLTSDDKARFIQRQLVEIRQITKHVARILDERFNNELDSKGRRIRKVKIVTLKSNLVSNFRKEFGFYKIREVNNYHHAHDAYLNAVVAKAILTKYPQLEPEFVYGDYPKYNSYKTRKATEKLFFYSNIMNFFKTKVTLADGTVVVKDDIEVNNDTGEIVWDKKKHFATVRKVLSYPQNNIVKKTEIQTGGFSKESILAHGNSDKLIPRKTKDIYLDPKKYGGFDSPIVAYSVLVVADIKKGKAQKLKTVTELLGITIMERSRFEKNPSAFLESKGYLNIRADKLIILPKYSLFELENGRRRLLASAGELQKGNELALPTQFMKFLYLASRYNESKGKPEEIEKKQEFVNQHVSYFDDILQLINDFSKRVILADANLEKINKLYQDNKENISVDELANNIINLFTFTSLGAPAAFKFFDKIVDRKRYTSTKEVLNSTLIHQSITGLYETRIDLGKLGED

SEQ ID NO: 79 - protein, 1365 aa, Streptococcus agalactiae
MNKPYSIGLDIGTNSVGWSIITDDYKVPAKKMRVLGNTDKEYIKKNLIGALLFDGGNTAADRRLKRTARRRYTRRRNRILYLQEIFAEEMSKVDDSFFHRLEDSFLVEEDKRGSKYPIFATLQEEKDYHEKFSTIYHLRKELADKKEKADLRLIYIALAHIIKFRGHFLIEDDSFDVRNTDISKQYQDFLEIFNTTFENNDLLSQNVDVEAILTDKISKSAKKDRILAQYPNQKSTGIFAEFLKLIVGNQADFKKYFNLEDKTPLQFAKDSYDEDLENLLGQIGDEFADLFSAAKKLYDSVLLSGILTVIDLSTKAPLSASMIQRYDEHREDLKQLKQFVKASLPEKYQEIFADSSKDGYAGYIEGKTNQEAFYKYLSKLLTKQEDSENFLEKIKNEDFLRKQRTFDNGSIPHQVHLTELKAIIRRQSEYYPFLKENQDRIEKILTFRIPYYIGPLAREKSDFAWMTRKTDDSIRPWNFEDLVDKEKSAEAFIHRMTNNDFYLPEEKVLPKHSLIYEKFTVYNELTKVRYKNEQGETYFFDSNIKQEIFDGVFKEHRKVSKKKLLDFLAKEYEEFRIVDVIGLDKENKAFNASLGTYHDLEKILDKDFLDNPDNESILEDIVQTLTLFEDREMIKKRLENYKDLFTESQLKKLYRRHYTGWGRLSAKLINGIRDKESQKTILDYLIDDGRSNRNFMQLINDDGLSFKSIISKAQAGSHSDNLKEVVGELAGSPAIKKGILQSLKIVDELVKVMGYEPEQIVVEMARENQTTNQGRRNSRQRYKLLDDGVKNLASNILKEYPTDNQALQNERLFLYYLQNGRDMYTGEALDIDNLSQYDIDHIIPQAFIKDDSIDNRVLVSSAKNRGKSDDVPSLEIVKDCKVFWKKLLDAKLMSQRKYDNLTKAERGGLTSDDKARFIQRQLVETRQITKHVARILDERFNNELDSKGRRIRKVKIVTVKSNLVSNFRKEFGFYKIREVNNYHHAHDAYLNAVVAKAILTKYPQLEPEFVYGDYPKYNSYKTRKATEKLFFYSNIMNFFKTKVTLADGTVVVKDDIEVNNDTGEIVWDKKKHFATVRKVLSYPQNNIVKKTEIQTGGFSKESILAHGNSDKLIPRKTKDIYLDPKKYGGFDSPIVAYSVLVVADIKKGKAQKLKTVTELLGITIMERSRFEKNPSAFLESKGYLNIRADKLIILPKYSLFELENGRRRLLASAGELQKGNELALPTQFMKFLYLASRYNESKGKPEEIEKKQEFVNQHVSYFDDILQLINDFSKRVILADANLEKINKLYQDNKENISVDELANNIINLFTFTSLGAPAAFKFFDKIVDRKRYTSTKEVLNSTLIHQSITGLYETRIDLGKLGED

SEQ ID NO: 80 - protein, 1365 aa, Streptococcus agalactiae
MNKPYSIGLDIGTNSVGWSIITDDYKVPAKKMRVLGNTDKEYIKKNLIGALLFDGGNTAADRRLKRTARRRYTRRRNRILYLQEIFAEEMSKVDDSFFHRLEDSFLVEEDKRGSKYPIFATLQEEKDYHEKFSTIYHLRKELADKKEKADLRLIYIALAHIIKFRGHFLIEDDSFDVRNTDISKQYQDFLEIFNTTFENNDLLSQNVDVEAILTDKISKSAKKDRILAQYPNQKSTGIFAEFLKLIVGNQADFKKYFNLEDKTPLQFAKDSYDEDLENLLGQIGDEFADLFSAAKKLYDSVLLSGILTVIDLSTKAPLSASMIQRYDEHREDLKQLKQFVKASLPEKYQEIFADSSKDGYAGYIEGKTNQEAFYKYLSKLLTKQEDSENFLEKIKNEDFLRKQRTFDNGSIPHQVHLTELKAIIRRQSEYYPFLKENQDRIEKILTFRIPYYIGPLAREKSDFAWMTRKTDDSIRPWNFEDLVDKEKSAEAFIHRMTNNDFYLPEEKVLPKHSLIYEKFTVYNELTKVRYKNEQGETYFFDSNIKQEIFDGVFKEHRKVSKKKLLDFLAKEYEEFRIVDVIGLDKENKAFNASLGTYHDLEKILDKDFLDNPDNESILEDIVQTLTLFEDREMIKKRLENYKDLFTESQLKKLYRRHYTGWGRLSAKLINGIRDKESQKTILDYLIDDGRSNRNFMQLINDDGLSFKSIISKAQAGSHSDNLKEVVGELAGSPAIKKGILQSLKIVDELVKVMGYEPEQIVVEMARENQTTNQGRRNSRQRYKLLDDGVKNLASNILKEYPTDNQALQNERLFLYYLQNGRDMYTGEALDIDNLSQYDIDHIIPQAFIKDDSIDNRVLVSSAKNRGKSDDVPSLEIVKDCKVFWKKLLDAKLMSQRKYDNLTKAERGGLTSDDKARFIQRQLVETRQITKHVARILDELFNNELDSKGRRIRKVKIVTLKSNLVSNFRKEFGFYKIREVNNYHHAHDAYLNAVVAKAILTKYPQLEPEFVYGDYPKYNSYKTRKATEKLFFYSNIMNFFKTKVTLADGTVVVKDDIEVNNDTGEIVWDKKKHFATVRKVLSYPQNNIVKKTEIQTGGFSKESILAHGNSDKLIPRKTKDIYLDPKKYGGFDSPIVAYSVLVVADIKKGKAQKLKTVTELLGITIMERSRFEKNPSAFLESKGYLNIRADKLIILPKYSLFELENGRRRLLASAGELQKGNELALPTQFMKFLYLASRYNESKGKPEEIEKKQEFVNQHVSYFDDILQLINDFSKRVILADANLEKINKLYQDNKENISVDELANNIINLFTFTSLGAPAAFKFFDKIVDRKRYTSTKEVLNSTLIHQSITGLYETRIDLGKLGGD

SEQ ID NO: 81 - protein, 1365 aa, Streptococcus agalactiae; identical to SEQ ID NO: 50

SEQ ID NO: 82 - protein, 1365 aa, Streptococcus agalactiae
MNKPYSIGLDIGTNSVGYSVVTDDYKVPAKKMRVLGNTDKEYIKKNLIGALLFDGGNTASDRRLKRTARRRYTRRRNRILYLQEIFAEEMSKVDDSFFHRLEDSFLVEDDKRGSKYPIFATMQEEKDYHEKFPTIYHLRKELADKKEKANLRLVYLALAHIIKFRGHFLIEDDSFDVRNTDIQRQYQAFLEIFDTTFENNHLLSQNIDVEGILTDKISKSAKKDRILAQYPNQKSTGIFAEFLKLIVGNQADFKKHFNLEDKTPLQFAKDSYDEDLENLLGQIGDEFADLFSVAKKLYDSVLLSGILTVTDLSTKAPLSASMIQRYDEHREDLKQLKQFVKASLPEKYQEIFTDSSKDGYAGYIEGKTNQGAFYKYLSKLLTKQEGSEYFLEKIKNEDFLRKQRTFDNGSIPHQVHLTELKAIIRRQSEYYPFLKENLDRIEKILTFRIPYYVGPLAREKSDFAWMTRKTDDSIRPWNFEELVDKEASAEAFIHRMTNNDLYLPEEKVLPKHSLIYEKFTVYNELTKVRYKNEQGETYFFDSNIKQEIFDGVFKEHRKVSKKKLLDFLAKEYEEFRIVDVIGLDKENKAFNASLGTYHDLKKILDKDFLDNPDNESILEDIVQTLTLFEDREMIKKRLENYKDLFTESQLKKLYRRHYTGWGRLSAKLINGIRDKESQKTILDYLISDGRANRNFMQLIHDDGLSFKPIIDKAQAGSHSDNLKEVVGELAGSPAIKKGILQSLKIVDELVKVMGYEPEQVVVEMARENQTTNKGRRNTRQRYKLLEEGVKNLASNILKEYPTDNQALQNERLFLYYLQNGRDMYTGEALDIDNLSQYDIDHIVPQAFIKDDSIDNRVLVSSAKNRGKSDNVPSIDIVKARKAFWKKLLDAKLMSQRKYDNLTKAERGGLTSDDKARFIQRQLVETRQITKHVARILDERFNNELDSKGRRIRKVKIVTLKSNLVSNFRKEFGFYKIREVNDYHHAHDAYLNAVVAKAILTKYPQLEPEFVYGDYPKYNSYKTRKATEKLFFYSNIMNFFKTKVTLADGTVVVKDDIEVNNDTGEIVWDKKKHFATVRKVLSYPQVNIVKKTEIQTGGFSKESILAHGNSDKLIPRKTKDIYLDPKKYGGFDSPIVAYSVLVVADIKKGKAQKLKTVTELLGITIMERFRFEKNPSAFLESKGYLNIRDDKLMILPKYSLFELENGRRRLLASAGELQKGNELALPTQYMKFLYLASRYNELKGKPEEIEQKQEFVVQHVSYFDDILQIINDFSNRVILADANLEKINKLYQDNKENISVDELANNIINLFTFTSLGAPAAFKFFDKIVDRKRYTSTKEVLNSTLIHQSITGLYETRIDLGKLGED

SEQ ID NO: 83 - protein, 1365 aa, Streptococcus agalactiae
MNKPYSIGLDIGTNSVGWSIITDDYKVPAKKMRVLGNTDKEYIKKNLIGALLFDGRNTAADRRLKRTARRRYTRRRNRILYLQEIFAEEMSKVDDSFFHRLEDSFLVEEDKRGSKYPIFATLQEEKDYHEKFSTIYHLRKELADKKEKADLRLIYIALAHIIKFRGHFLIEDDSFDVRNTDISKQYQDFLEIFNTTFENNDLLSQNVDVEAILTDKISKSAKKDRILAQYPNQKSTGIFAEFLKLIVGNQADFKKYFNLEDKTPLQFAKDSYDEDLENLLGQIGDEFADLFSAAKKLYDSVLLSGILTVIDLSTKAPLSASMIQRYDEHREDLKQLKQFVKASLPEKYQEIFADSSKDGYAGYIEGKTNQEAFYKYLSKLLTKQEDSENFLEKIKNEDFLRKQRTFDNGSIPHQVHLTELKAIIRRQSEYYPFLKENQDRIEKILTFRIPYYIGPLAREKSDFAWMTRKTDDSIRPWNFEDLVDKEKSAEAFIHRMTNNDFYLPEEKVLPKHSLIYEKFTVYNELTKVRYKNEQGETYFFDSNIKQEIFDGVFKEHRKVSKKKLLDFLAKEYEEFRIVDVIGLDKENKAFNASLGTYHDLEKILDKDFLDNPDNESILEDIVQTLTLFEDREMIKKRLENYKDLFTESQLKKLYRRHYTGWGRLSAKLINGIRDKESQKTILDYLIDDGRSNRNFMQLINDDGLSFKSIISKAQAGSHSDNLKEVVGELAGSPAIKKGILQSLKIVDELVKVMGYEPEQIVVEMARENQTTNQGRRNSRQRYKLLDDGVKNLASNILKEYPTDNQALQNERLFLYYLQNGRDMYTGEALDIDNLSQYDIDHIIPQAFIKDDSIDNRVLVSSAKNRGKSDDVPSLEIVKDCKVFWKKLLDAKLMSQRKYDNLTKAERGGLTSDDKARFIQRQLVETRQITKHVARILDERFNNELDSKGRRIRKVKIVTLKSNLVSNFRKEFGFYKIREVNNYHHAHDAYLNAVVAKAILTKYPQLEPEFVYGDYPKYNSYKTRKATEKLFFYSNIMNFFKTKVTLADGTVVVKDDIEVNNDTGEIVWDKKKHFATVRKVLSYPQNNIVKKTEIQTGGFSKESILAHGNSDKLIPRKTKDIYLDPKKYGGFDSPIVAYSVLVVADIKKGKAQKLKTVTELLGITIMERSRFEKNPSAFLESKGYLNIRADKLIILPKYSLFELENGRRRLLASAGELQKGNELALPTQFMKFLYLASRYNESKGKPEEIEKKQEFVNQHVSYFDDILQLINDFSKRVILADANLEKINKLYQDNKENISVDELANNIINLFTFTSLGAPAAFKFFDKIVDRKRYTSTKEVLNSTLIHQSITGLYETRIDLGKLGED

SEQ ID NO: 84 - protein, 1365 aa, Streptococcus agalactiae
MNKPYSIGLDIGTNSVGWSIITDDYKVPAKKMRVLGNTDKEYIKKNLIGALLFDGGNTAADRRLKRTARRRYTRRRNRILYLQEIFAEEMSKVDDSFFHRLEDSFLVEEDKRGSKYPIFATMQEEKYYHEKFPTIYHLRKELADKKEKADLRLIYLALAHIIKFRGHFLIEDDSFDVRNTDIQKQYQAFLEIFDTTFENNDLLSQNVDVEAILTDKISKSAKKDRILARYPNQKSTGIFAEFLKLIVGNQADFKKHFNLEDKTPLQFAKDSYDEDLENLLGQIGDEFADLFSAAKKLYDSVLLSGILTVTDLSTKAPLSASMIQRYDEHREDLKQLKQFVKASLPEKYQEIFADSSKDGYAGYIEGKTNQEAFYKYLSKLLTKQEGSEYLLEKIKNEDFLRKQRTFDNGSIPHQVHLTELRAIIRRQSEYYPFLKENLDRIEKILTFRIPYYVGPLAREKSDFAWMTRKTDDSIRPWNFEDLVDKEKSAEAFIHRMTNNDLYLPEEKVLPKHSLIYEKFTVYNELTKVRFLAEGFKDFQFLNRKQKETIFNSLFKEKRKVTEKDIISFLNKVDGYEGIAIKGIEKQFNASLSTYHDLKKILGKDFLDNTDNELILEDIVQTLTLFEDREMIRKRLDIYKDFFTESQLKKLYRRHYTGWGRLSAKLINGIRNKENQKTILDYLIDDGSANRNFMQLIKDAGLSFKPIIDKARTGSHSDNLKEVVGELAGSPAIKKGILQSLKIVDELVKVMGYEPEQIVVEMARENQTTAKGLSRSRQRLTTLRESLANLKSEKKPKYVKDQVENHHLSDDRLFLYYLQNGKDMYTDDELDIDNLSQYDIDHIIPQAFIKDDSIDNRVLVSSAKNRGKSDDVPSVEIVKDCKVFWKKLLDAKLMSQRKYDNLTKAERGGLTSDDKARFIQRQLVETRQITKHVARILDERFNNELDSKGRRIRKVKIVTLKSNLVSNFRKEFGFYKIREVNNYHHAHDAYLNAVVAKAILTKYPQLEPEFVYGDYPKYNSYKTRKATEKLFFYSNIMNFFKTKVTLADGTVVVKDDIEVNNDTGEIVWDKKKHFATVRKVLSYPQVNIVKKTEIQTGGFSKESILAHGNSDKLIPRKTKDIYLDPKKYGGFDSPIVAYSVLVVADIKKGKAQKLKTVTELLGITIMERSRFEKNPSAFLESKGYLNIRDDKLMILPKYSLFELENGRRRLLASAGELQKGNELALPTQFMKFLYLASRYNELKGKPEEIEQKQEFVVQHVSYFDDILQIINDFSNRVILADANLEKINKLYQDNKENIPVDELANNIINLFTFTSLGAPAAFKFFDKIVDRKRYTSTKEVLNSTLIHKSITGLYETRIDLGKLGED

SEQ ID NO: 85 - protein, 1365 aa, Streptococcus agalactiae
MNKPYSIGLDIGTNSVGWSIITDDYKVPAKKMRVLGNTDKEYIKKNLIGALLFDGGNTAADRRLKRTARRRYTRRRNRILYLQEIFAEEMSKVDDSFFHRLEDSFLVEEDKRGSKYPIFATLQEEKDYHEKFSTIYHLRKELADKKEKADLRLIYIALAHIIKFRGHFLIEDDSFDVRNTDISKQYQDFLEIFNTTFENNDLLSQNVDVEAILTDKISKSAKKDRILAQYPNQKSTGIFAEFLKLIVGNQADFKKYFNLEDKTPLQFAKDSYDEDLENLLGQIGDEFADLFSAAKKLYDSVLLSGILTVIDLSTKAPLSASMIQRYDEHREDLKQLKQFVKASLPEKYQEIFADSSKDGYAGYIEGKTNQEAFYKYLSKLLTKQEDSENFLEKIKNEDFLRKQRTFDNGSIPHQVHLTELKAIIRRQSEYYPFLKENQDRIEKILTFRIPYYIGPLAREKSDFAWMTRKTDDSIRPWNFEDLVDKEKSAEAFIHRMTNNDFYLPEEKVLPKHSLIYEKFTVYNELTKVRYKNEQGETYFFDSNIKQEIFDGVFKEHRKVSKKKLLDFLAKEYEEFRIVDVIGLDKENKAFNASLGTYHDLEKILDKDFLDNPDNESILEDIVQTLTLFEDREMIKKRLENYKDLFTESQLKKLYRRHYTGWGRLSAKLINGIRDKESQKTILDYLIDDGRSNRNFMQLINDDGLSFKSIISKAQAGSHSDNLKEVVGELAGSPAIKKGILQSLKIVDELVKVMGYEPEQIVVEMARENQTTNQGRRNSRQRYKLLDDGVKNLASNILKEYPTDNQALQNERLFLYYLQNGRDMYTGEALDIDNLSQYDIDHIIPQAFIKDDSIDNRVLVSSAKNRGKSDDVPSLEIVKDCKVFWKKLLDAKLMSQRKYDNLTKAERGGLTSDDKARFIQRQLVETRQITKHVARILDERFNNELDSKGRRIRKVKIVTLKSNLVSNFRKEFGFYKIREVNNYHHAHDAYLNAVVAKAILTKYPQLEPEFVYGDYPKYNSYKTRKATEKLFFYSNIMNFFKTKVTLADGTVVIKDDIEVNNDTGEIVWDKKKHFATVRKVLSYPQNNIVKKTEIQTGGFSKESILAHGNSDKLIPRKTKDIYLDPKKYGGFDSPIVAYSVLVVADIKKGKAQKLKTVTELLGITIMERSRFEKNPSAFLESKGYLNIRADKLIILPKYSLFELENGRRRLLASAGELQKGNELALPTQFMKFLYLASRYNESKGKPEEIEKKQEFVNQHVSYFDDILQLINDFSKRVILADANLEKINKLYQDNKENISVDELANNIINLFTFTSLGAPAAFKFFDKIVDRKRYTSTKEVLNSTLIHQSITGLYETRIDLGKLGED

SEQ ID NO: 86 - protein, 1365 aa, Streptococcus agalactiae
MNKPYSIGLDIGTNSVGWSIITDDYKVPAKKMRVLGNTDKEYIKKNLIGALLFDGGNTAADRRLKRTARRRYTRRRNRILYLQEIFAEEMSKVDDSFFHRLEDSFLVEEDKRGSKYPIFATLQEEKDYHEKFSTIYHLRKELADKKEKADLRLIYIALAHIIKFRGHFLIEDDSFDVRNTDISKQYQDFLEIFNTTFENNDLLSQNVDVEAILTDKISKSAKKDRILAQYPNQKSTGIFAEFLKLIVGNQADFKKYFNLEDKTPLQFAKDSYDEDLENLLGQIGDEFADLFSAAKKLYDSVLLSGILTVIDLSTKAPLSASMIQRYDEHREDLKQLKQFVKASLPEKYQEIFADSSKDGYAGYIEGKTNQEAFYKYLSKLLTKQEDSENFLEKIKNEDFLRKQRTFDNGSIPHQVHLTELKAIIRRQSEYYPFLKENQDRIEKILTFRIPYYIGPLAREKSDFAWMTRKTDDSIRPWNFEDLVDKEKSAEAFIHRMTNNDFYLPEEKVLPKHSLIYEKFTVYNELTKVRYKNEQGETYFFDSNIKQEIFDGVFKEHRKVSKKKLLDFLAKEYEEFRIVDVIGLDKENKAFNASLGTYHDLEKILDKDFLDNPDNESILEDIVQTLTLFEDREMIKKRLENYKDLFTESQLKKLYRRHYTGWGRLSAKLINGIRDKESQKTILDYLIDDGRSNRNFMQLINDDGLSFKSIISKAQAGSHSDNLKEVVGELAGSPAIKKGILQSLKIVDELVKVMGYEPEQIVVEMARENQTTNQGRRNSRQRYKLLDDGVKNLASNILKEYPTDNQALQNERLFLYYLQNGRDMYTGEALDIDNLSQYDIDHIIPQAFIKDDSIDNRVLVSSAKNRGKSDDVPSLEIVKDCKVFWKKLLDAKLMSQRKYDNLTKAERGGLTSDDKARFIQRQLVETRQITKHVASILDERFNNELDSKGRRIRKVKIVTLKSNLVSNFRKEFGFYKIREVNNYHHAHDAYLNAVVAKAILTKYPQLEPEFVYGDYPKYNSYKTRKATEKLFFYSNIMNFFKTKVTLADGTVVVKDDIEVNNDTGEIVWDKKKHFATVRKVLSYPQNNIVKKTEIQTGGFSKESILAHGNSDKLIPRKTKDIYLDPKKYGGFDSPIVAYSVLVVADIKKGKAQKLKTVTELLGITIMERSRFEKNPSAFLESKGYLNIRADKLIILPKYSLFELENGRRRLLASAGELQKGNELALPTQFMKFLYLASRYNESKGKPEEIEKKQEFVNQHVSYFDDILQLINDFSKRVILADANLEKINKLYQDNKENISVDELANNIINLFTFTSLGAPAAFKFFDKIVDRKRYTSTKEVLNSTLIHQSITGLYETRIDLGKLGED

SEQ ID NO: 87 - protein, 1365 aa, Streptococcus agalactiae
MNKPYSIGLDIGTNSVGYSVVTDDYKVPAKKMRVLGNTDKEYIKKNLIGALLFDGGNTASDRRLKRTARRRYTRRRNRILYLQEIFAEEMSKVDDSFFHRLEDSFLVEDDKRGSKYPIFATMQEEKDYHEKFPTIYHLRKELADKKEKANLRLVYLALAHIIKFRGHFLIEDDSFDVRNTDIQRQYQAFLEIFDTTFENNHLLSQNIDVEGILTDKISKSAKKDRILAQYPNQKSTGIFAEFLKLIVGNQADFKKHFNLEDKTPLQFAKDSYDEDLENLLGQIGDEFADLFSVAKKLYDSVLLSGILTVTDLSTKAPLSASMIQRYDEHREDLKQLKQFVKASLPEKYQEIFTDSSKDGYAGYIESKTNQGAFYKYLSKLLTKQEGSEYFLEKIKNEDFLRKQRTFDNGSIPHQVHLTELKAIIRRQSEYYPFLKENLDRIEKILTFRIPYYVGPLAREKSDFAWMTRKTDDSIRPWNFEELVDKEASAEAFIHRMTNNDLYLPEEKVLPKHSLIYEKFTVYNELTKVRYKNEQGETYFFDSNIKQEIFDGVFKEHRKVSKKKLLDFLAKEYEEFRIVDVIGLDKENKAFNASLGTYHDLKKILDKDFLDNPDNESILEDIVQTLTLFEDREMIKKRLENYKDLFTESQLKKLYRRHYTGWGRLSAKLINGIRDKESQKTILDYLISDGRANRNFMQLIHDDGLSFKPIIDKAQAGSHSDNLKEVVGELAGSPAIKKGILQSLKIVDELVKVMGYEPEQVVVEMARENQTTNQGRRNTRQRYKLLEEGVKNLASNILKEYPTDNQALQNERLFLYYLQNGRDMYTGEALDIDNLSQYDIDHIVPQAFIKDDSIDNRVLVSSAKNRGKSDNVPSIDIVKARKAFWKKLLDAKLMSQRKYDNLTKAERGGLTSDDKARFIQRQLVETRQITKHVARILDERFNNELDSKGRRIRKVKIVTLKSNLVSNFRKEFGFYKIREVNDYHHAHDAYLNAVVAKAILTKYPQLEPEFVYGDYPKYNSYKTRKATEKLFFYSNIMNFFKTKVTLADGTVVVKDDIEVNNDTGEIVWDKKKHFATVRKVLSYPQVNIVKKTEIQTGGFSKESILAHGNSDKLIPRKTKDIYLDPKKYGGFDSPIVAYSVLVVADIKKGKAQKLKTVTELLGITIMERFRFEKNPSAFLESKGYLNIRDDKLMILPKYSLFELENGRRRLLASAGELQKGNELALPTQYMKFLYLASRYNELKGKPEEIEQKQEFVVQHVSYFDDILQIINDFSNRVILADANLEKINKLYQDNKENISVDELANNIINLFTFTSLGAPAAFKFFDKIVDRKRYTSTKEVLNSTLIHQSITGLYETRIDLGKLGED

SEQ ID NO: 88 - protein, 1365 aa, Streptococcus agalactiae
MNKPYSIGLDIGTNSVGWSIITDDYKVPAKKMRVLGNTDKEYIKKNLIGALLFDGGNTAADRRLKRTARRRYTRRRNRILYLQEIFAEEMSKVDDSFFHRLEDSFLVEEDKRGSKYPIFATLQEEKDYHEKFSTIYHLRKELADKKEKADLRLIYIALAHIIKFRGHFLIEDDSFDVRNTDISKQYQDFLEIFNTTFENNDLLSQNVDVEAILTDKISKSAKKDRILAQYPNQKSTGIFAEFLKLIVGNQADFKKYFNLEDKTPLQFAKDSYDEDLENLLGQIGDEFADLFSAAKKLYDSVLLSGILTVIDLSTKAPLSASMIQRYDEHREDLKQLKQFVKASLPEKYQEIFADSSKDGYAGYIEGKTNQEAFYKYLSKLLTKQEDSENFLEKIKNEDFLRKQRTFDNGSIPHQVHLTELKAIIRRQSEYYPFLKENQDRIEKILTFRIPYYIGPLAREKSDFAWMTRKTDDSIRPWNFEDLVDKEKSAEAFIHRMTNNDFYLPEEKVLPKHSLIYEKFTVYNELTKVRYKNEQGETYFFDSNIKQEIFDGVFKEHRKVSKKKLLDFLAKEYEEFRIVDVIGLDKENKAFNASLGTYHDLEKILDKDFLDNPDNESILEDIVQTLTLFEDREMIKKRLENYKDLFTESQLKKLYRRHYTGWGRLSAKLINGIRDKESQKTILDYLIDDGRSNRNFMQLINDDGLSFKSIISKAQAGSHSDNLKEVVGELAGSPAIKKGILQSLKIVDELVKVMGYEPEQIVVEMARENQTTNQGRRNSRQRYKLLDDGVKNLASNILKEYPTDNQALQNERLFLYYLQNGRDMYTGEALDIDNLSQYDIDHIIPQAFIKDDSIDNRVLVSSAKNRGKSDDVPSLEIVKDCKVFWKKLLDAKLMSQRKYDNLTKAERGGLTSDDKARFIQRQLVETRQITKHVARILDERFNNELDSKGRRIRKVKIVTLKSNLVSNFRKEFGFYKIREVNNYHHAHDAYLNAVVAKAILTKYPQLEPEFVYGDYPKYNSYKTRKATEKLFFYSNIMNFFKTKVTLADGTVVVKDDIEVNNDTGEIVWDKKKHFATVRKVLSYPQNNIVKKTEIQTGGFSKESILAHGNSDKLIPRKTKDIYLDPKKYGGFDSPIVAYSVLVVADIKKGKAQKLKTVTELLGITIMERSRFEKNLSAFLESKGYLNIRADKLIILPKYSLFELENGRRRLLASAGELQKGNELALPTQFMKFLYLASRYNESKGKPEEIEKKQEFVNQHVSYFDDILQLINDFSKRVILADANLEKINKLYQDNKENISVDELANNIINLFTFTSLGAPAAFKFFDKIIDRKRYTSTKEVLNSTLIHQSITGLYETRIDLGKLGED

SEQ ID NO: 89 - protein, 1365 aa, Streptococcus agalactiae
MNKPYSIGLDIGTNSVGWSIITDDYKVPAKKMRVLGNTDKEYIKKNLIGALLFDGGNTAADRRLKRTARRRYTRRRNRILYLQEIFAEEMSKVDDSFFHRLEDSFLVEEDKRGSKYPIFATLQEEKDYHEKFSTIYHLRKELADKKEKADLRLIYIALAHIIKFRGHFLIEDDSFDVRNTDISKQYQDFLEIFNTTFENNDLLSQNVDVEAILTDKISKSAKKDRILAQYPNQKSTGIFAEFLKLIVGNQADFKKYFNLEDKTPLQFAKDSYDEDLENLLGQIGDEFADLFSAAKKLYDSVLLSGILTVIDLSTKAPLSASMIQRYDEHREDLKQLKQFVKASLPEKYQEIFADSSKDGYAGYIEGKTNQEAFYKYLSKLLTKQEDSENFLEKIKNEDFLRKQRTFDNGSIPHQVHLTELKDIIRRQSEYYPFLKENQDRIEKILTFRIPYYIGPLAREKSDFAWMTRKTDDSIRPWNFEDLVDKEKSAEAFIHRMTNNDFYLPEEKVLPKHSLIYEKFTVYNELTKVRYKNEQGETYFFDSNIKQEIFDGVFKEHRKVSKKKLLDFLAKEYEEFRIVDVIGLDKENKAFNASLGTYHDLEKILDKDFLDNPDNESILEDIVQTLTLFEDREMIKKRLENYKDLFTESQLKKLYRRHYTGWGRLSAKLINGIRDKESQKTILDYLIDDGRSNRNFMQLINDDGLSFKSIISKAQAGSHSDNLKEVVGELAGSPAIKKGILQSLKIVDELVKVMGYEPEQIVVEMARENQTTNQGRRNSRQRYKLLDDGVKNLASNILKEYPTDNQALQNERLFLYYLQNGRDMYTGEALDIDNLSQYDIDHIIPQAFIKDDSIDNRVLVSSAKNRGKSDDVPSLEIVKDCKVFWKKLLDAKLMSQRKYDNLTKAERGGLTSDDKARFIQRQLVETRQITKHVARILDERFNNELDSKGRRIRKVKIVTLKSNLVSNFRKEFGFYKIREVNNYHHAHDAYLNAVVAKAILTKYPQLEPEFVYGDYPKYNSYKTRKATEKLFFYSNIMNFFKTKVTLADGTVVVKDDIEVNNDTGEIVWDKKKHFATVRKVLSYPQNNIVKKTEIQTGGFSKESILAHGNSDKLIPRKTKDIYLDPKKYGGFDSPIVAYSVLVVADIKKGKAQKLKTVTELLGITIMERSRFEKNPSAFLESKGYLNIRADKLIILPKYSLFELENGRRRLLASAGELQKGNELALPTQFMKFLYLASRYNESKGKPEEIEKKQEFVNQHVSYFDDILQLINDFSKRVILADANLEKINKLYQDNKENISVDELANNIINLFTFTSLGAPAAFKFFDKIVDRKRYTSTKEVLNSTLIHQSITGLYETRIDLGKLGED

SEQ ID NO: 90 - protein, 1365 aa, Streptococcus agalactiae
MNKPYSIGLDIGTNSVGWSIITDDYKVPAKKMRVLGNTDKEYIKKNLIGALLFDGGNTAADRRLKRTARRRYTRRRNRILYLQEIFAEEMSKVDDSFFHRLEDSFLVEEDKRGSKYPIFATMQEEKDYHEKFPTIYHLRKELADKKEKADLRLVYLALAHIIKFRGHFLIEDDRFDVRNTDIQKQYQAFLEIFDTSFENNHLLSQNVDVEAILTDKISKSAKKDRILAQYPNQKSTGIFAEFLKLIVGNQADFKKHFNLEDKTPLQFAKDSYDEDLENLLGQIGDEFADLFSAAKKLYDSVLLSGILTVTDLSTKAPLSASMIQRYDEHREDLKQLKQFVKASLPEKYQEIFADSSKDGYAGYIEGKTNQEAFYKYLSKLLTKQEDSEYFLEKIKNEDFLRKQRTFDNGSIPHQVHLTELKAIIRRQSEYYPFLKENQDKIEKILTFRIPYYVGPLARGNSDFAWMTRKTDDSIRPWNFEDLVDKEKSAEAFIHRMTNNDLYLPEEKVLPKHSLIYEKFTVYNELTKVRYKNEQGETYFFDSNVKQEIFDGVFKEHRKVSKKQLLDFLAKEFEEFRIVDVTGLDKENKAFNASLGTYHDLKKILDKDFLDNPDNESILEDIVQTITLFEDREMIKKRLENYKDLFTESQLKKLYRRHYTGWGRLSAKLINGIRDRESQKIILDYLISDGRANRNFMQLINDDGLSFKSIISKAQSGSHSDNLKEVVGELAGSPAIKKGILQSLKIVDELVKVMGYEPEQIVVEMARENQTTNQGRRNSRQRYKLLEDGVKNLASDILKEYPTDNQALQNERLFLYYLQNGRDMYTGEALDIDSLSQYDIDHIVPQAFIKDDSIDNRVLVSSAKNRGKSDDVPSIDIVKARKAFWKKLLDAKLISQRKYDNLTKAERGGLTPDDKAGFIQRQLVETRQITKHVARILDERFNNKVDDNNKPIRKVKIVTLKSNLVSNFRKEFGFYKIREVNNYHHAHDAYLNAVVAKAILTKYPQLEPEFVYGDYPKYNSYKTRKATEKLFFYSNIMNFFKTKVTLADETVVVKDDIEVNNETGEIAWDKKKHFATVRKVLSYPQVNIVKKTEVQTGGFSKESILAHSNSDKLIPRKTKDIYLDPKKYGGFDSPIVAYSVLVLADIKKGKAQKLKTVKELIGITIMERERFEKNPSAFLESKGYLNIRTDKLIILPKYSLFELENGRRRLLASAGELQKGNELALPTQYMKFLYLASRYNESKGKPEEIEKKQEFVNQHVSYFDDILQLINDFSKRVILADANLEKINKLYSDNKDNTPVDELAKNIINLFTFTSLGAPAAFKFFDKSVDRKRYTSTKEVLDSTLIHQSITGLYETRIDLGKLGED

SEQ ID NO: 91 - protein, 1365 aa, Streptococcus agalactiae
  VARIANT 9: note = Xaa can be any naturally occurring amino acid
MNKPYSIGXDIGTNSVGWSIITDDYKVPAKKMRVLGNTDKEYIKKNLIGALLFDGGNTAADRRLKRTARRRYTRRRNRILYLQEIFAEEMSKVDDSFFHRLEDSFLVEEDKRGSKYPIFATLQEEKDYHEKFSTIYHLRKELADKKEKADLRLIYIALAHIIKFRGHFLIEDDSFDVRNTDISKQYQDFLEIFNTTFENNDLLSQNVDVEAILTDKISKSAKKDRILAQYPNQKSTGIFAEFLKLIVGNQADFKKYFNLEDKTPLQFAKDSYDEDLENLLGQIGDEFADLFSAAKKLYDSVLLSGILTVIDLSTKAPLSASMIQRYDEHREDLKQLKQFVKASLPEKYQEIFADSSKDGYAGYIEGKTNQEAFYKYLSKLLTKQEDSENFLEKIKNEDFLRKQRTFDNGSIPHQVHLTELKAIIRRQSEYYPFLKENQDRIEKILTFRIPYYIGPLAREKSDFAWMTRKTDDSIRPWNFEDLVDKEKSAEAFIHRMTNNDFYLPEEKVLPKHSLIYEKFTVYNELTKVRYKNEQGETYFFDSNIKQEIFDGVFKEHRKVSKKKLLDFLAKEYEEFRIVDVIGLDKENKAFNASLGTYHDLEKILDKDFLDNPDNESILEDIVQTLTLFEDREMIKKRLENYKDLFTESQLKKLYRRHYTGWGRLSAKLINGIRDKESQKTILDYLIDDGRSNRNFMQLINDDGLSFKSIISKAQAGSHSDNLKEVVGELAGSPAIKKGILQSLKIVDELVKVMGYEPEQIVVEMARENQTTNQGRRNSRQRYKLLDDGVKNLASNILKEYPTDNQALQNERLFLYYLQNGRDMYTGEALDIDNLSQYDIDHIIPQAFIKDDSIDNRVLVSSAKNRGKSDDVPSLEIVKDCKVFWKKLLDAKLMSQRKYDNLTKAERGGLTSDDKARFIQRQLVETRQITKHVARILDERFNNELDSKGRRIRKVKIVTLKSNLVSNFRKEFGFYKIREVNNYHHAHDAYLNAVVAKAILTKYPQLEPEFVYGDYPKYNSYKTRKATEKLFFYSNIMNFFKTKVTLADGTVVVKDDIEVNNDTGEIVWDKKKHFATVRKVLSYPQNNIVKKTEIQTGGFSKESILAHGNSDKLIPRKTKDIYLDPKKYGGFDSPIVAYSVLVVADIKKGKAQKLKTVTELLGITIMERSRFEKNPSAFLESKGYLNIRADKLIILPKYSLFELENGRRRLLASAGELQKGNELALPTQFMKFLYLASRYNESKGKPEEIEKKQEFVNQHVSYFDDILQLINDFSKRVILADANLEKINKLYQDNKENISVDELANNIINLFTFTSLGAPAAFKFFDKIVDRKRYTSTKEVLNSTLIHQSITGLYETRIDLGKLGED

SEQ ID NO: 92 - protein, 1365 aa, Streptococcus agalactiae
MNKPYSIGLDIGTNSVGWSIITDDYKVPAKKMRVLGNTDKEYIKKNLIGALLFDGGNTAADRRLKRIARRRYTRRRNRILYLQEIFAEKMSKVDDSFFHRLEDSFLVEEDKRGSKYPIFATLQEEKDYHEKFPTIYHLRKELADKKEKADLRLVYLALAHIIKFRGHFLIEDDRFDVRNTDIQKQYQAFLEIFDTTFENNHLLSQNVDVEAILTDKISKSAKKDRILAQYPDQKSTGIFAEFLKLIVGNQADFKKHFNLEDKTPLQFAKDSYDEDLENLLGQIGDEFADLFSAAKKLYDSVLLSGILTVTDLSTKAPLSASMIQRYDEHREDLKQLKQFVKASLPEKYQEIFADSSKDGYAGYIEGKTNQEAFYKYLSKLLTKQEGSEYLLEKIKNEDFLRKQRTFDNGSIPHQVHLTELRAIIRRQSEYYPFLKENLDRIEKILTFRIPYYVGPLAREKSDFAWMTRKTDDSIRPWNFEELVDKEASAEAFIHCMTNNDLYLPEEKVLPKHSLIYEKFTVYNELTKVRYKNEQGETYFFDSNIKQEIFDGVFKEYRKVSKKQLLDFLAKEFEEFRIVDVTGLDKENKAFNASLGTYHDLEKILGKDFLDNPDNESILEDIVQTLTLFEDREMIKKRLDIYKDFFTESQLKKLYRRHYTGWGRLSAKLINGIRNKENQKTILDYLIDDGSANRNFMQLIKDAGLSFKSIISKAQSGSHSDNLKEVVSELAGSPAIKKGILQSLKIVDELVKVMGYKPEQIVVEMARENQTTNQGRRNSRQRYKLLDDGVRNLASNILKEYPTDNQALQNERLFLYYLQNGRDMYTEKALDIDNLSQYDIDHIIPQAFIKDDSIDNRVLVSSAKNRGKSDDVPSLEIVKDCKVFWKKLLDAKLMSQRKYDNLTKAERGGLTSDDKARFIQRQLVETRQITKHVARILDERFNNELDSKGRRIRKVKIVTLKSNLVSNFRKEFGFYKIREVNDYHHAHDAYLNAVVAKAILTKYPQLEPEFVYGDYPKYNSYKTRKATEKLFFYSNIMNFFKTKVTLADGTVVVKDDIEVNNDTGEIVWDKKKHFATVRKVLSYPQNNIVKKTEIQTGGFSKESILAHGNSDKLIPRKTKDIYLDPKKYGGFDSPIVAYSVLVVADIKKGKAQKLKTVTELLGITIMERSRFEKNPSAFLESKGYLNIRTDKLIILPKYSLFELENGRRRLLASAGELQKGNELALPTQFMKFLYLASRYNESKGKPEEIEKKQEFVNQHVSYFDDILQIINDFSNRVILADANLEKINKLYQDNKENISVDELANNIINLFTFTSLGAPAAFKFFDKIVDRKRYTSTKEVLNSTLIHQSITGLYETRIDLGKLGED

SEQ ID NO: 93 - protein, 1351 aa, Streptococcus anginosus
MNQKYSIGLDIGTNSVGWAVITDDYKVPAKKMKVLGNTDKQSIKKNLLGALLFDSGETAEATRLKRTARRRYTRRRNRLRYLQEIFAEEMMQVDESFFQRLDDSFLVDEDKRGERHPIFGNIAAEVKYHDEFPTIYHLRKHLADISQKADLRLVYLALAHMIKFRGHFLIEGQLKAENTNVQALFKDFVEVYDKTVEESHLSEITVDALSILTEKVSKSRRLENLIAHYPAEKKNTLFGNLIALFLGLQPNFKTNFQLSEDAKLQFSKDTYEEDLEGLLGEVGDEYADLFASAKNLYDAILLSGILTVDDNSTKAPLSASMVKRYEEHQKDLKKFEDFIKVNALDQYNAIFKDKNKKGYAGYIESGVKQDEFYKYLKGILLQINGSGDFLDKIDREDFLRKQRTFDNGSIPHQIHLQEMHAILRRQGEHYPFLKENQDKIEKILTFRIPYYVGPLARKGSRFAWAEYKADEKITPWNFDDILDKEKSAEKFITRMTLNDLYLPEEKVLPKHSLLYETFTVYNELTKVKYVNEQGEAKFFDANMKQEIFDHVFKENRKVTKDKLLNYLNKEFEEFRIVNLTGLDKENKVFNSSLGTYHDLRKILNKSFLDNKENAQIIEDIIQTLTLFEDREMIRQRLQKYSDIFTKAQLKKLERRHYTGWGRLSYKLINGIRNKENKKTILDYLIDDGYANRNFMQLINDDALSFKEEIAKAQIIGDVDDIANVVHDLPGSPAIKKGILQSVKIVDELVKVMGHNPANIIIEMARENQTTDRGRRNSQQRLKLLQDSLKPVNIKNVENQQLQNDRLFLYYIQNGKDMYTGETLDINNLSQYDIDHIIPQAYIKDDSFDNRVLTSSSENRGKSDNVPSIEVVCARKADWMRLRKAGLISQRKFDNLTKAERGGLTENDKAGFIKRQLVETRQITKHVAQVLDARFNAKHDENKKVIRDVKIITLKSNLVSQFRKDFKFYKVREINDYHHAHDAYLNAVIGTALLKKYPKLASEFVYGEFKKYDVSDKEIGKATAKYFFYSNLMNFFKKEVKFADGTVVERPDIETSEDGEIAWNKQTDFKIVRKVLSYPQVNIVKKTEVQTHGLDRPSPKPKPDSSENLVGVKRNLDPKKYGGYAGISNSYAVLVKAIIEKGVKKKETMVLEFQGISILDRITFEKDKRAFLLGKGYKDIKKIIELPKYSLFELKDGSRRMLASRGEIHKGNELFVPQKFTTLLYHAKRINNPINKDHIEYVKKHRDDFKELLNYVLEFNEKYVGATKNGERLKEAVADFDSKSNEEICTSFLGLFELTSLGSASDFEFLGVKIPRYRDYTPSSLLKDSTLIHQSITGLYETRIDLSKLGED

SEQ ID NO: 94 - protein, 1341 aa, Streptococcus anginosus
MKKEYSIGLDIGTNSVGWAVITDDYKVPAKKMKVLGNTDKQSIKKNLLGALLFDSGETAEATRLKRTARRRYTRRKNRLRYLQEIFTEEMNKVDENFFQRLDDSFLVEEDKQGSKYPIFGTLKEEKEYHKKFKTIYHLREELANSKEKADLRLVYLALAHMIKFRGHFLYEGDLKAENTDVQALFKDFVEEYDKTIEESHLSEITVDALSILTEKVSKSSRLENLIAHYPTEKKNTLFGNLIALSLGLQPNFKTNFQLSEDAKLQFSKDTYEEDLEELLGEIGDEYADLFASAKNLYDAILLSGILAVDDNTTKAPLSASMVKRYEEHQKDLKKLKDFIKVNAPDQYNAIFKDKNKKGYAGYIESGVEQDEFYKYLKGILLKINGSGDFLDKIDCEDFLRKQRTFDNGSIPHQIHLQEMHAILRRQGEHYPFLKENQDKIEKILTFRIPYYVGPLARKGSRFAWAEYKADEKITPWNFDDILDKEKSAEKFITRMTLNDLYLPEEKVLPKHSPLYETFTVYNELTKVKYVNEQGEAKFFDTNMKQEIFDHVFKENRKVTKDKLLNYLNKEFEEFRIVNLTGLDKENKAFNSSLGTYHDLRKILDKSFLDDKANEKTIEDIIQTLTLFEDREMIRQRLQKYSDIFTKAQLKKLERRHYTGWGRLSYKLINGIRNKENKKTILDYLIDDGYANRNFMQLINDDALSFKEEIARAQIIGDVDDIANVVHDLPGSPAIKKGILQSVKIVDELVKVMGHNPANIIIEMARENQTTDKGRRNSQQRLKLLQDSLKPVNIKNVENQQLQNDRLFLYYIQNGKDMYTGETLDINNLSQYDIDHIIPQAFIKDNSLDNRVLTRSDKNRGKSDDVPSIEVVHEMKSFWSKLLSVKLITQRKFDNLTKAERGGLTEEDKAGFIKRQLVETRQITKHVAQILDERFNTEFDGAQRRIRNVKIITLKSNLVSNFRKEFELYKVREINDYHHAHDAYLNAVVGNALLLKYPQLEPEFVYGEYPKYNSYRSRKSATEKFLFYSNILRFFKKEDIQTNEDGEIAWNKEKHIKILRKVLSYPQVNIVKKTEEQTGGFSKESILPKGESDKLIPRKTKNSYWNPKKYGGFDSPVVAYSILVFADVEKGKSKKLRKVQDMVGITIMEKKRFEKNPVDFLEQRGYRNVRLEKIIKLPKYSLFELENKRRRLLASARELQKGNELVIPQRFTTLLYHSYQIEKNYEPEHREYVEKHKDEFKELLEYISVFSRKYVLADNNLTKIEMLFSKNKDAEVSSLAKSFISLLTFTAFGAPAAFNFFGENIDRKRYTSVTECLNATLIHQSITGLYETRIDLSKLGED

SEQ ID NO: 95 - protein, 1341 aa, Streptococcus anginosus
MKKEYSIGLDIGTNSVGWAVITDDYKVPAKKMKVLGNTDKQSIKKNLLGALLFDSGETAEATRLKRTARRRYTRRRNRLRYLQEIFAEEMMQVDESFFQRLDDSFLVEEDKRGSRYPIFGNIAAEVKYHDDFPTIYHLRKHLVDISQKADLRLVYLALAHMIKFRGHFLIEGQLKAENTNVQALFKDFVEVYDKTVEESHLSEMTVDALSILTEKVSKSRRLENLVECYPTEKKNTLFGNLIALSLGLQPNFKTNFQLSEDAKLQFSKDTYEEDLEGLLGEIGDEYADLFASAKNLYDAILLSGILAVDDNTTKAPLSASMVKRYEEHQKDLKKLKDFIKVNAPAQYDDIFKDETKNGYAGYIENGVKQDEFYKYLKNTLSKIDGSDYFLDKIDREDFLRKQRTFDNGSIPHQIHLQEMHAILRRQGEHYPFLKENQDKIEKILTFRIPYYVGPLARKGSRFAWAEYKADEKITPWNFDDILDKEKSAEKFITRMTLNDLYLPEEKVLPKHSPLYETFTVYNELTKVKYVNEQGEAKFFDTNMKQEIFDHVFKENRKVTKDKLLNYLNKEFEEFRIVNLTGLDKENKAFNASLGTYHDLRKILDKSFLDDKVNEKIIEDIIQTLTLFEDREMIRQRLQKYSDIFTTQQLKKLERRHYTGWGRLSYKLINGIRNKENKKTILDYLIDDGYANRNFMQLINDDALSFKEEIARAQIIGDVDDIANVVHDLPGSPAIKKGILQSVKIVDELVKVMGHNPANIIIEMARENQTTDKGRRNSQQRLKLLQDSLKPVNIKNVENQQLQNDRLFLYYIQNGKDMYTGETLDINNLSQYDIDHIIPQAFIKDNSLDNRVLTRSDKNRGKSDDVPSIEVVHEMKSFWSKLLSVKLITQRKFDNLTKAERGGLTEEDKAGFIKRQLVETRQITKHVAQILDERFNTEFDGAQRRIRNVKIITLKSNLVSNFRKEFELYKVREINDYHHAHDAYLNAVVGNALLLKYPQLEPEFVYGEYPKYNSYRSRKSATEKFLFYSNILRFFKKEDIQTNEDGEIAWNKEKHIKILRKVLSYPQVNIVKKTEEQTGGFSKESILPKGESDKLIPRKTKNSYWNPKKYGGFDSPVVAYSILVFADVEKGKSKKLRKVQDMVGITIMEKKRFEKHPVDFLEQRGYRNVRLEKIIKLPKYSLFELENKRRRLLASARELQKGNELVIPQRFTTLLYHSYRIEKDYEPEHREYVEKHKDEFKELLEYISVFSRKYVLADNNLTKIEMLFSKNKDAEVSSLAKSFISLLTFTAFGAPAAFNFFGENIDRKRYTSVTECLNATLIHQSITGLYETRIDLSKLGED

SEQ ID NO: 96 - protein, 1341 aa, Streptococcus anginosus; identical to SEQ ID NO: 94

SEQ ID NO: 97 - protein, 1360 aa, Streptococcus caballi
MTKKNYSIGLDIGTNSVGWAVITDDYKVPAKKMKVLGNTDKKYIKKNLLGALLFDSGETAEATRLKRTARRRYTRRKNRLRYLQDIFTEEMAKVDDSFFQRLDESFLTDNDKNFDSHPIFGNKAEEDAYHQKFPTIYHLRKHLADSTEKADLRLVYLALAHMIKFRGHFLIEGELNAENTDVQKLFTDFVGVYDRTFDDSHLSEITVDAASILTEKISKSRRLENLINNYPKEKKNTLFGNLIALALGLQPNFKTNFKLSEDAKLQFSKDTYEEDLEELLGKIGDDYADLFTSSKNLYDAILLSGILTVDDNSTKAPLSASMIKRYVEHHEDLEKLKEFIKANKSELYHDIFKDKTQNGYAGYIENGVKQDEFYKYLKGILTKINGSDYFLDKIEREDFLRKQRTFDNGSIPHQIHLQEMHAILRRQGDYYPFLKENQEEIEKILTFRIPYYVGPLARKDSRFAWAEYRSDEKITPWNFDKVIDKEKSAEKFITRMTLNDLYLPEEKVLPKHSHVYETFAVYNELTKVKYVNEQGKDSFFDSNMKQEIFDHVFKENRKVTKEKLLNYLDKEFPEYRIQDLVGLDKENKSFNASLGTYHDLKKILDKSFLDDKVNEEVIEDIIKTLTLFEDREMIQQRLQKYSDIFTKQQLKKLERRHYTGWGRLSYKLINGIRNKENNKTILDYLIDDGSANRNFMQLINDDALSFKQIIQEAQVVGDVDDIETVVHDLPGSPAIKKGILQSVKIVDELIKVMGDNPDNIVIEMARENQTTNRGRSQSQQRLKKLQNSLKPSYIEDKVENSHLQNDQLFLYYIQNGKDMYTGDELDIDHLSDYDIDHIIPQAFIKDDSIDNRVLTSSAKNRGKSDDVPSLGIVRARKAEWVRLYKSGLISKRKFDNLTKAERGGLTEADKAGFIKRQLVETRQITKHVAQILDARFNTERDENDKVIRDVKVITLKSNLVSQFRKEFKFYKVREINDYHHAHDAYLNAVVGTALLKKYPKLAPEFVYGEYKKYDVSSDDHSEMGKATAKYFFYSNLMNFFKRVIRYSNGKVIVRPVVEYSKDTGEIAWNKRTDFEKVRKVLSYPQVNIVKKVETQTGGFSKESILPKGDSDKLIPRKTKKVLWEPKKYGGFDSPTVAYSVLVVADVEKGKTKKLKTVKELVGISIMERSFFEKNPVEFLKNKGYQNVQEDKLMKLPKYSLFEFEGGRRRLLASATELQKGNEIMLSAHLVALLYHAHRIGNFNSAEHLKYVSEHKKEFEEVLSCVENFANVYVDVEKNLSKIRAAADSMDNFSIEEISDSFINLLTLTALGAPADFNFLGEKIPRKRYNSTKECLNATLIHQSITGLYETRIDLSKLGEE

SEQ ID NO: 98 - protein, 1355 aa, Streptococcus canis
MEKKYSIGLDIGTNSVGWAVITDDYKVPSKKFKVLGNTNRKSIKKNLMGALLFDSGETAEATRLKRTARRRYTRRKNRIRYLQEIFANEMAKLDDSFFQRLEESFLVEEDKKNERHPIFGNLADEVAYHRNYPTIYHLRKKLADSPEKADLRLIYLALAHIIKFRGHFLIEGKLNAENSDVAKLFYQLIQTYNQLFEESLDEIEVDAKGILSARLSKSKRLEKLIAVFPNEKKNGLFGNIIALALGLTPNFKSNFDLTEDAKLQLSKDTYDDDLDELLGQIGDQYADLFSAAKNLSDAILLSDILRSNSEVTKAPLSASMVKRYDEHHQDLALLKTLVRQQFPEKYAEIFKDDTKNGYAGYVGIGATQEEFYKFIKPILEKMDGAEELLAKLNRDDLLRKQRTFDNGSIPHQIHLKELHAILRRQEEFYPFLKENREKIEKILTFRIPYYVGPLARGNSRFAWLTRKSEEAITPWNFEEVVDKGASAQSFIERMTNFDEQLPNKKVLPKHSLLYEYFTVYNELTKVKYVTERMRKPEFLSGEQKKAIVDLLFKTNRKVTVKQLKEDYFKKIECFDSVEIIGVEDRFNASLGTYHDLLKIIKDKDFLDNEENEDILEDIVLTLTLFEDREMIEERLKTYAHLFDDKVMKQLKRRHYTGWGRLSRKMINGIRDKQSGKTILDFLKDGFSNRNFMQLIHDDSLTFKEEIEKAQVSGQGDSLHEQIADLAGSPAIKKGILQTVKIVDELVKVMGHKPENIVIEMARENQTTTKGLQQSRERKKRIEEGIKELESQILKENPVENTQLQNEKLYLYYLQNGRDMYVDQELDINRLSDYDVDHIVPQSFIKDDSIDNKVLTRSVENRGKSDNVPSEEVVKKMKNYWRQLLNAKLITQRKFDNLTKAERGGLSEADKAGFIKRQLVETRQITKHVARILDSRMNTKRDKNDKPIREVKVITLKSKLVSDFRKDFQLYKVRDINNYHHAHDAYLNAVVGTALIKKYPKLESEFVYGDYKVYDVSEQEIGKATAKRFFYSNIMNFFKTEVKLANGEIRKRPLIETNGETGEVVWNKEKDFATVRKVLAMPQVNIVKKTEVQTGGFSKESILSKRESAKLIPRKKGWDTRKYGGFGSPTVAYSILVVAKVEKGKAKKLKSVKVLVGITIMEKGSYEKDPIGFLEAKGYKDIKKELIFKLPKYSLFELENGRRRMLASELQKANELVLPQHLVRLLYYTQNISATTGSNNLGYIEQHREEFKEIFEKIIDFSEKYILKNKVNSNLKSSFDEQFAVSDSILLSNSFVSLLKYTSFGASGGFTFLDLDVKQGRLRYQTVTEVLDATLIYQSITGLYETRTDLSQLGGD

SEQ ID NO: 99 - protein, 1341 aa, Streptococcus constellatus
MGKPYSIGLDIGTNSVGWAVVTDDYKVPAKKMKVLGNTDKQSIKKNLLGALLFDSGETAEATRLKRTARRRYTRRKNRLRYLQEIFTGEMNKVDENFFQRLDDSFLVDEDKRGEHHPIFGNIAAEVKYHDDFPTIYHLRRHLADTSKKADLRLVYLALAHMIKFRGHFLYEGDLKAENTDVQALFKDFVEEYDKTIEESHLSEITVDALSILTEKVSKSSRLENLIAHYPTEKKNTLFGNLIALSLDLHPNFKTNFQLSEDAKLQFSKDTYEEDLEGFLGEVGDEYADLFASAKNLYDAILLSGILTVDDNSTKAPLSASMVKRYEEHQKDLKKLKDFIKVNAPDQYNAIFKDKNKKGYASYIESGVKQDEFYKYLKGILLKINGSGDFLDKIDREDFLRKQRTFDNGSIPHQIHLQEMHAILRRQGEHYPFLKENQDKIEKILTFRIPYYVGPLARKGSRFAWAEYKADEKITPWNFDDILDKEKSAEKFITRMTLNDLYLPEEKVLPKHSPLYEAFTVYNELTKVKYVNEQGEAKFFDTNMKQEIFDHVFKENRKVTKDKLLNYLNKEFEEFRIVNLTGLDKENKAFNSSLGTYHDLRKILDKSFLDDKANEKTIEDIIQTLTLFEDREMIRQRLQKYSDIFTKAQLKKLERRHYTGWGRLSYKLINGIRNKENKKTILDYLIDDGYANRNFMQLINDDALSFKEEIARAQIIDDVDDIANVVHDLPGSPAIKKGILQSVKIVDELVKVMGHNPANIIIEMARENQTTDKGRRNSQQRLKLLQDSLKPVNIKNVENQQLQNDRLFLYYIQNGKDMYTGETLDINNLSQYDIDHIIPQAFIKDNSLDNRVLTRSDKNRGKSDDVPSIEVVHEMKSFWSKLLSVKLITQRKFDNLTKAERGGLTEEDKAGFIKRQLVETRQITKHVAQILDERFNTEFDGNKRRIRNVKIITLKSNLVSNFRKEFELYKVREINDYHHAHDAYLNAVVGNALLLKYPQLEPEFVYGEYPKYNSYRSRKSATEKFLFYSNILRFFKKEDIQTNEDGEIAWNKEKHIKILRKVLSYPQVNIVKKTEEQTGGFSKESILPKGESDKLIPRKTKNSYWDPKKYGGFDSPVVAYSILVFADVEKGKSKKLRKVQDMVGITIMEKKRFEKNPVDFLEQRGYRNVRLEKIIKLPKYSLFELENKRRRLLASAKELQKGNELVIPQRFTTLLYHSYRIEKDYEPEHREYVEKHKDEFKELLEYISVFSRKYVLADNNLTKIEMLFSKNKDAEVSSLAKSFISLLTFTAFGAPAAFNFFGENIDRKRYTSVTECLNATLIHQSITGLYETRIDLSKLGED

SEQ ID NO: 100 - protein, 1355 aa, Streptococcus constellatus
MTQKYSIGLDIGTNSVGWAIVTDDYKVPAKKMKILGNTNKQYIKKNLLGALLFDSGETAKATRLKRTARRRYTRRKNRLRYLQEIFIEEMNKVDENFFQRLDDSFLVTEDKRGSKYPIFGTLKEEKEYYKEFETIYHLRKRLADSTGKVDLRLVYLALAHMIKFRGHFLIEGQLKAENTDVQTLFNDFVEVYDKTIEESHLAEITVDALSILTEKVSKSRRLENLVKCYPTEKKNTLFGNLIALSLGLQPNFKTNFQLSEDAKLQFSKDTYEEDLEELLGKIGDDYADLFTSAKNLYDTILLSGILAVDDNSTKALLSASMIKRYEEHQKDLKKLKDFIKVNAPAQYDDIFKDETKNGYAGYIENGVKQDEFYKYLKNTLSKIDGSGYFLDKIEREDFLRKQRTFDNGSIPHQIHLQEMHAILRRQGEHYPFLKENQDKIEKILTFRIPYYVGPLVRKGSRFAWAEYKADEKITPWNFDDILDKEKSAEKFITRMTLNDLYLPEEKVLPKHSLLYEIFTVYNELTKVKYVNEQGEAKFFDANMKQEIFDHVFKENPKVTKDKLLNYLDKEFDEFRIVDLTGLDKENKAFNASLGTYHDLRKILDKSFLDDKANEKTIEDIIQTLTLFEDREMIRQRLQKYSDIFTKAQLKKLERRHYTGWGRLSYKLINGIRNKENNKTILEYLVDDGYANRNFMQLINDDTLPFKQIIKDAQAIDDVDDIELIVHDLPGSPAIKKGILQSIKIVDELVKVMGYNPDNIVIEMARENQTTTKGRRNSQQRLKLLQDSLTPVSIKNVENQQLQNDRLFLYYIQNGKDMYTGEELDIHHLSDYDIDHIIPQAFIKDDSIDNRVLTSSAKNRGKSDNVPNLEVVCDRKADWIRLREAGLISQRKFDNLTKAERGGLTENDKAGFIHRQLVETRQITKHVAQILDARFNPKRDDNKKVIRDVKIITLKSNLVSQFRRDFKLYKVREINDYHHAHDAYLNAVVGTALLKKYPKLTSEFVYGEYKKYDVSDNDEIGKATAKYFFYSNLMNFFKTEVKFADGTVVERPDIETSEDGEIAWNKQTDFKIVRKVLSYPQVNIVKKVEKQTGRFSKESILPKGDSDKLIARKTKENYWDTKKYGGFDSPTVAYSVLVVADIKKGKAKKLKTVKELVGISIMERPFFEKNPIMFLESKGYRNIQKDKLIKLPKYSLFEFEGGRRRLLASAVELQKGNEMVLPQYLNNLLYHAHRIDNSDNSEHLKYITEHKEEFGKLLSYIENFAKSYVDVDKNLEKIQLAVEKIDSFSVKEISNSFIHLLTLTALGAPADFNFLGEKIPRKRYTSTKECLNATLIHQSITGLYETQTDLSKLGED

SEQ ID NO: 101 - protein, 1356 aa, Streptococcus dysgalactiae
MDKKYSIGLDIGTNSVGWAVITDDYKVPSKKFKVLGNTDRHSIKKNLIGALLFDSGETAEATRLKRTARRRYTRRKNRIRYLQEIFSSEMSKVDDSFFHRLEESFLVEEDKKHERHPIFGNIVDEVAYHEKYPTIYHLRKKLADSTDKADLRLIYLALAHMIKFRGHFLIEGDLNPDNSDMDKLFIQLVQTYNQLFEENINASRVDAKAILSARLSKSRRLENLIAQLPGEKRNGLFGNLIALSLGLTPNFKSNFDLAEDAKLQLSKDTYDDDLDNLLAQIGDQYADLFLAAKNLSDAILLSDILRVNSEITKAPLSASMIKRYDEHHQDLTLLKALVRQQLPEKYKEIFFDQSKNGYAGYIDGGASQEEFYKFIKPILEKMDGTEELLAKLNREDLLRKQRTFDNGSIPHQIHLGELHAILRRQEDFYPFLKDNREKIEKILTFRIPYYVGPLARGNSRFAWMTRKSEETITPWNFEEVVDKGASAQSFIERMTNFDKNLPNEKVLPKHSLLYEYFTVYNELTKVKYVTEGMRKPEFLSGKQKEAIVDLLFKTNRKVTVKQLKEDYFKKIECFDSVEISGVEDRFNASLGTYHDLLKIIKDKDFLDNEENEDILEDIVLTLTLFEDKEMIEERLKKYANLFDDKVMKQLKRRHYTGWGRLSRKLINGIRDKQSGKTILDFLKDGFANRNFMQLINDDSLTFKEAIQKAQVSGQGHSLHEQIANLAGSPAIKKGILQSVKVVDELVKVMGHKPENIVIEMARENQTTQKGQKNSRERMKRIEEGIKELGSQILKEHPVENTQLQNEKLYLYYLQNGRDMYVDQELDINRLSDYDVDHIVPQSFIKDDSIDNKILTRSDKNRGKSDNVPSEEVVKKMKNYWRQLLNAKLITQRKFDNLTKAERGGLSELDKAGFIKRQLVETRQITKHVAQILDSRMNTKYDENDKLIREVKVITLKSKLVSDFRKDFQFYKVREINNYHHAHDAYLNAVVGTALIKKYTKLESEFVYGDYKVYDVSEQEIGKATAKRFFYSNIMNFFKTEITLANGEIRKRPLIETNEETGEIVWDKGRDFATVRKVLSMPQVNIVKKTEVQTGALTNESIYARGSFDKLISRKHRFESSKYGGFGSPTVTYSVLVVAKSKVQDGKVKKIKTGKELIGMTLLDKLVFEKNPLKFIEDKGYGNVQIDKCIKLPKYSLFEFENGTRRMLASRGDLQKANEMFLPAKLVTLLYHAHKIESSKELEHEAYILDHYNDLYQLLSYIERFASLYVDVEKNISKVKELFSNIESYSISEICSSVINLLTLTASGAPADFKFLGTTIPRKRYGSPQSILSSTLIHQSITGLYETRIDLSQLGGD

SEQ ID NO: 102 - protein, 1356 aa, Streptococcus dysgalactiae
MDKKYSIGLDIGTNSVGWAVITDDYKVPSKKFKVLGNTDRHSIKKNLIGALLFDSGETAEATRLKRTARRRYTRRKNRIRYLQEIFSSEMSKVDDSFFHRLEESFLVEEDKKHERHPIFGNIVDEVAYHEKYPTIYHLRKKLADSTDKADLRLIYLALAHMIKFRGHFLIEGDLNPDNSDVDKLFIQLVQTYNQLFEEKINASGVDAKAILSARLSKSKRLENLIAQLPGEKKNGLFGNLIALSLGLTPNFKSNFDLAEDAKLQLSKDTYDDDLDNLLAQIGNQYADLFLAAKNLSDAILLSDILRVNSEITKAPLSASMIKRYDEHHQDLTLLKALVRQQLPEKYKEIFFDQSKNGYAGYIDGGASQEEFYKFIKPILEKMDGTEELLAKLNREDLLRKQRTFDNGSIPHQIHLGELHAILRRQEDFYPFLKDNREKIEKILTFRIPYYVGPLARGNSRFAWMTRKSEETITPWNFEEVVDKGASAQSFIERMTNFDKNLPNEKVLPKHSLLYEYFTVYNELTKVKYVTEGMRKPEFLSGKQKEAIVDLLFKTNRKVTVKQLKEDYFKKIECFDSVEISGVEDRFNASLGTYHDLLKIIKDKDFLDNEENEDILEDIVLTLTLFEDKEMIEERLKKYANLFDDKVMKQLKRRHYTGWGRLSRKLINGIRDKQSGKTILDFLKDGFANRNFMQLINDDSLTFKEAIQKAQVSGQGHSLHEQIANLAGSPAIKKGILQSVKVVDELVKVMGHKPENIVIEMARENQTTQKGQKNSRERMKRIEEGIKELGSQILKEHPVENTQLQNEKLYLYYLQNGRDMYVDQELDINRLSDYDVDHIVPQSFIKDDSIDNKVLTRSDKNRGKSDNVPSEEVVKKMKNYWRQLLNAKLITQRKFDNLTKAERGGLSELDKAGFIKRQLVETRQITKHVAQILDSRMNTKYDENDKLIREVKVITLKSKLVSDFRKDFQFYKVREINNYHHAHDAYLNAVVGTALIKKYPKLESEFVYGDYKVYDVSEQEIGKATAKRFFYSNIMNFFKTEITLANGEIRKRPLIETNEETGEIVWDKGRDFATVRKVLSMPQVNIVKKTEVQTGALTNESIYARGSFDKLISRKHRFESSKYGGFGSPTVTYSVLVVAKSKVQDGKVKKIKTGKELIGITLLDKLVFEKNPLKFIEDKGYGNVQIDKCIKLPKYSLFEFENGTRRMLASRGDLQKANEMFLPAKLVTLLYHAHKIESSKELEHEAYILDHYNDLYQLLSYIERFASLYVDVEKNISKVKELFSNIESYSISEICSSVINLLTLTASGAPADFKFLGTTIPRKRYGSPQSILSSTLIHQSITGLYETRIDLSQLGGD

SEQ ID NO: 103 - protein, 1356 aa, Streptococcus dysgalactiae
MDKKYSIGLDIGTNSVGWAVITDDYKVPSKKFKVLGNTDRHSIKKNLIGALLFDSGETAEATRLKRTARRRYTRRKNRIRYLQEIFSSEMSKVDDSFFHRLEESFLVEEDKKHERHPIFGNIVDEVAYHEKYPTIYHLRKKLADSTDKADLRLIYLALAHMIKFRGHFLIEGDLNPDNSDMDKLFIQLVQTYNQLFEENINASRVDAKAILSARLSKSRRLENLIAQLPGEKRNGLFGNLIALSLGLTPNFKSNFDLAEDAKLQLSKDTYDDDLDNLLAQIGDQYADLFLAAKNLSDAILLSDILRVNSEITKAPLSASMIKRYDEHHQDLTLLKALVRQQLPEKYKEIFFDQSKNGYAGYIDGGASQEEFYKFIKPILEKMDGTEELLAKLNREDLLRKQRTFDNGSIPHQIHLGELHAILRRQEDFYPFLKDNREKIEKILTFRIPYYVGPLARGNSRFAWMTRKSEETITPWNFEEVVDKGASAQSFIERMTNFDKNLPNEKVLPKHSLLYEYFTVYNELTKVKYVTEGMRKPEFLSGKQKEAIVDLLFKTNRKVTVKQLKEDYFKKIECFDSVEISGVEDRFNASLGTYHDLLKIIKDKDFLDNEENEDILEDIVLTLTLFEDKEMIEERLKTYAHLFDDKVMKQLKRRHYTGWGRLSRKLINGIRDKQSGKTILDFLKDGFANRNFIQLIHDDSLTFKEAIQKAQVSGQGHSLHEQIANLAGSPAIKKGILQSVKVVDELVKVMGHKPENIVIEMARENQTTQKGQKNSRERMKRIEEGIKELGSQILKEHPVENTQLQNEKLYLYYLQNGRDMYVDQELDINRLSDYDVDHIVPQSFIKDDSIDNKVLTRSDKNRGKSDDVPSEEVVKKMKNYWRQLLNAKLITQRKFDNLTKAERGGLSELDKAGFIKRQLVETRQITKHVAQILDSRMNTKYDENDKLIREVKVITLKSKLVSDFRKDFQFYKVREINNYHHAHDAYLNAVVGTALIKKYPKLESEFVYGDYKVYDVSEQEIGKATAKRFFYSNIMNFFKTEITLANGEIRKRPLIETNEETGEIVWNKGRDFATVRKVLSMPQVNIVKKTEVQTGALTNESIYARGSFDKLISRKHRFESSKYGGFGSPTVTYSVLVVAKSKVQDGKVKKIKTGKELIGITLLDKLVFEKNPLKFIEDKGYGNVQIDKCIKLPKYSLFEFENGTRRMLASRGDLQKANEMFLPAKLVTLLYHAHKIESSKELEHEAYILDHYNDLYQLLSYIERFASLYVDVEKNISKVKELFSNIESYSISEICSSVINLLTLTASGAPADFKFLGTTIPRKRYGSPQSILSSTLIHQSITGLYETRIDLSQLGGD

SEQ ID NO: 104 - protein, 1356 aa, Streptococcus dysgalactiae
MDKKYSIGLDIGTNSVGWAVITDDYKVPSKKFKVLGNTDRHSIKKNLIGALLFDSGETAEATRLKRTARRRYTRRKNRIRYLQEIFSSEMSKVDDSFFHRLEESFLVEEDKKHERHPIFGNIVDEVAYHEKYPTIYHLRKKLADSTDKADLRLIYLALAHMIKFRGHFLIEGDLNPDNSDMDKLFIQLVQTYNQLFEENINASRVDAKAILSARLSKSRRLENLIAQLPGEKRNGLFGNLIALSLGLTPNFKSNFDLAEDAKLQLSKDTYDDDLDNLLAQIGDQYADLFLAAKNLSDAILLSDILRVNSEITKAPLSASMIKRYDEHHQDLTLLKALVRQQLPEKYKEIFFDQSKNGYAGYIDGGASQEEFYKFIKPILEKMDGTEELLAKLNREDLLRKQRTFDNGSIPHQIHLGELHAILRRQEDFYPFLKDNREKIEKILTFRIPYYVGPLARGNSRFAWMTRKSEETITPWNFEEVVDKGASAQSFIERMTNFDKNLPNEKVLPKHSLLYEYFTVYNELTKVKYVTEGMRKPEFLSGKQKEAIVDLLFKTNRKVTVKQLKEDYFKKIECFDSVEISGVEDRFNASLGTYHDLLKIIKDKDFLDNEENEDILEDIVLTLTLFEDKEMIEERLKKYANLFDDKVMKQLKRRHYTGWGRLSRKLINGIRDKQSGKTILDFLKDGFANRNFMQLINDDSLTFKEAIQKAQVSGQGHSLHEQIANLAGSPAIKKGILQSVKVVDELVKVMGHKPENIVIEMARENQTTQKGQKNSRERMKRIEEGIKELGSQILKEHPVENTQLQNEKLYLYYLQNGRDMYVDQELDINRLSDYDVDHIVPQSFIKDDSIDNKVLTRSDKNRGKSDNVPSEEVVKKMKNYWRQLLNAKLITQRKFDNLTKAERGGLSELDKAGFIKRQLVETRQITKHVAQILDSRMNTKYDENDKLIREVKVITLKSKLVSDFRKDFQFYKVREINNYHHAHDAYLNAVVGTALIKKYPKLESEFVYGDYKVYDVSEQEIGKATAKRFFYSNIMNFFKTEITLANGEIRKRPLIETNEETGEIVWDKGRDFATVRKVLSMPQVNIVKKTEVQTGALTNESIYARGSFDKLISRKHRFESSKYGGFGSPTVTYSVLVVAKSKVQDGKVKKIKTGKELIGITLLDKLVFEKNPLKFIEDKGYGNVQIDKCIKLPKYSLFEFENGTRRMLASRGDLQKANEMFLPAKLVTLLYHAHKIESSKELEHEAYILDHYNDLYQLLSYIERFASLYVDVEKNISKVKELFSNIESYSISEICSSVINLLTLTASGAPADFKFLGTTIPRKRYGSPQSILSSTLIHQSITGLYETRIDLSQLGGD

SEQ ID NO: 105 - protein, 1356 aa, Streptococcus dysgalactiae
MDKKYSIGLDIGTNSVGWAVITDDYKVPSKKFKVLGNTDRHSIKKNLIGALLFDSGETAEATRLKRTARRRYTRRKNRIRYLQEIFSSEMSKVDDSFFHRLEESFLVEEDKKHERHPIFGNIVDEVAYHEKYPTIYHLRKKLADSTDKADLRLIYLALAHMIKFRGHFLIEGDLNPDNSDMDKLFIQLVQTYNQLFEENINASRVDAKAILSARLSKSRRLENLIAQLPGEKRNGLFGNLIALSLGLTPNFKSNFDLAEDAKLQLSKDTYDDDLDNLLAQIGDQYADLFLAAKNLSDAILLSDILRVNSEITKAPLSASMIKRYDEHHQDLTLLKALVRQQLPEKYKEIFFDQSKNGYAGYIDGGASQEEFYKFIKPILEKMDGTEELLAKLNREDLLRKQRTFDNGSIPHQIHLGELHAILRRQEDFYPFLKDNREKIEKILTFRIPYYVGPLARGNSRFAWMTRKSEETITPWNFEEVVDKGASAQSFIERMTNFDKNLPNEKVLPKHSLLYEYFTVYNELTKVKYVTEGMRKPEFLSGKQKEAIVDLLFKTNRKVTVKQLKEDYFKKIECFDSVEISGVEDRFNASLGTYHDLLKIIKDKDFLDNEENEDILEDIVLTLTLFEDKEMIEERLKTYAHLFDDKVMKQLKRRHYTGWGRLSRKLINGIRDKQSGKTILDFLKDGFANRNFIQLIHDDSLTFKEAIQKAQVSGQGHSLHEQIANLAGSPAIKKGILQSVKVVDELVKVMGHKPENIVIEMARENQTTQKGQKNSRERMKRIEEGIKELGSQILKEHPVENTQLQNEKLYLYYLQNGRDMYVDQELDINRLSDYDVDHIVPQSFIKDDSIDNKVLTRSDKNRGKSDDVPSEEVVKKMKNYWRQLLNAKLITQRKFDNLTKAERGGLSELDKAGFIKRQLVETRQITKHVAQILDSRMNTKYDENDKLIREVKVITLKSKLVSDFRKDFQFYKVREINNYHHAHDAYLNAVVGTALIKKYPKLESEFVYGDYKVYDVSEQEIGKATAKRFFYSNIMNFFKTEITLANGEIRKRPLIETNEETGEIVWDKGRDFATVRKVLSMPQVNIVKKTEVQTGALTNESIYARGSFDKLISRKHRFESSKYGGFGSPTVTYSVLVVAKCKVQDGKVKKIKTGKELIGITLLDKLVFEKNPLKFIEDKGYGNVQIDKCIKLPKYSLFEFENGTRRMLASRGDLQKANEMFLPAKLVTLLYHAHKIESSKELEHEAYILDHYNDLYQLLSYIERFASLYVDVEKNISKVKELFSNIESYSISEICSSVINLLTLTASGAPADFKFLGTTIPRKRYGSPQSILSSTLIHQSITGLYETRIDLSQLGGD

SEQ ID NO: 106 - protein, 1356 aa, Streptococcus dysgalactiae
MDKKYSIGLDIGTNSVGWAVITDDYKVPSKKFKVLGNTDRHSIKKNLIGALLFDSGETAEATRLKRTARRRYTRRKNRIRYLQEIFSSEMSKVDDSFFHRLEESFLVEEDKKHERHPIFGNIVDEVAYHEKYPTIYHLRKKLADSTDKADLRLIYLALAHMIKFRGHFLIEGDLNPDNSDVDKLFIQLVQTYNQLFEENINASRVDAKAILSARLSKSRRLENLIAQLPGEKRNGLFGNLIALSLGLTPNFKSNFDLAEDAKLQLSKDTYDDDLDNLLAQIGDQYADLFLAAKNLSDAILLSDILRVNSEITKAPLSASMIKRYDEHHQDLTLLKALVRQQLPEKYKEIFFDQSKNGYAGYIDGGASQEEFYKFIKPILEKMDGTEELLAKLNREDLLRKQRTFDNGSIPHQIHLGELHAILRRQEDFYPFLKDNREKIEKILTFRIPYYVGPLARGNSRFAWMTRKSEETITPWNFEEVVDKGASAQSFIERMTNFDKNLPNEKVLPKHSLLYEYFTVYNELTKVKYVTEGMRKPAFLSGEQKKAIVDLLFKTNRKVTVKQLKEDYFKKIECFDSVEISGVEDRFNASLGTYHDLLKIIKDKDFLDNEENEDILEDIVLTLTLFEDKEMIEERLKTYAHLFDDKVMKQLKRRHYTGWGRLSRKLINGIRDKQSGKTILDFLKDGFANRNFIQLIHDDSLTFKEAIQKAQVSGQGHSLHEQIANLAGSPAIKKGILQSVKVVDELVKVMGHKPENIVIEMARENQTTQKGQKNSRERMKRIEEGIKELGSQILKEHPVENTQLQNEKLYLYYLQNGRDMYVDQELDINRLSDYDVDHIVPQSFIKDDSIDNKVLTRSDKNRGKSDNVPSEEVVKKMKNYWRQLLNAKLITQRKFDNLTKAERGGLSELDKAGFIKRQLVETRQITKHVAQILDSRMNTKYDENDKLIREVKVITLKSKLVSDFRKDFQFYKVREINNYHHAHDAYLNAVVGTALIKKYPKLESEFVYGDYKVYDVSEQEIGKATAKRFFYSNIMNFFKTEITLANGEIRKRPLIETNEETGEIVWDKGRDFATVRKVLSMPQVNIVKKTEVQTGALTNESIYARGSFDKLISRKHRFESSKYGGFGSPTVTYSVLVVAKSKVQDGKVKKIKTGKELIGITLLDKLVFEKNPLKFIEDKGYGNVQIDKCIKLPKYSLFEFENGTRRMLASRGDLQKANEMFLPAKLVTLLYHAHKIESSKELEHEAYILDHYNDLYQLLSYIERFASLYVDVEKNISKVKELFSNIESYSISEICSSVINLLTLTASGAPADFKFLGTTIPRKRYGSPQSILSSTLIHQSITGLYETRIDLSQLGGD

SEQ ID NO: 107 - protein, 1345 aa, Streptococcus equi
MKKPYTIALDIGTNSVGWVVVTDDYRVPTKKMKVLGNTERKTIKKNLIGALLFDSGDTAEGTRLKRTARRRYTRRKNRLRYLKEIFTEEMAKVDDGFFQRLEDSFYVLEDKEGNKHPIFANLADEVAYHKKYPTIYHLRKELVDNPQKADLRLIYLAVAHIIKFRGHFLIEGTLSSKNNNLQKSFDHLVDTYNLLFEEQLLTEGINAKELLSAALSKSKRLENLISLIPGQKKTGIFGNIIALSLGLTPNFKANFGLSKDVKLQLAKDTYADDLDSLLAQIGDQYADLFLAAKNLSDAILLSDILTESDEITRAPLSASMVKRYREHHKDLVTLKTLIKDQLPEKYQEIFLDKTKNGYAGYIEGQVSQEEFYKYLKPILARLDGSEPLLLKIDREDFLRKQRTFDNGSIPHQIHLEELHAILRRQEVFYPFLKDNRKKIESLLTFRIPYYVGPLARGHSRFAWVKRKFDGAIRPWNFEEIVDEEASAQIFIEKMTKNDLYLPNEKVLPKHSLLYETFTVYNELTKVKYATEGMTRPQFLSADQKQAIVDLLFKTNRKVTVKQLKENYFKKIECWDSVEITGVEDSFNASLGTYHDLLKIIQDKDFLDNPDNQKIIEDIILTLTLFEDKKMISKRLDQYAHLFDKVVLNKLERHHYTGWGRLSGKLINGIRDKQSGKTILDFLKDGFANRNFMQLIHDSELSFIDEIAKAQVIGKTEYSKDLVGNLAGSPAIKKGISQTIKIVDELVKIMGYLPQQIVIEMARENQTTAQGIKNARQRMRKLEETAKKLGSNILKEHPVDNSQLQNDKRYLYYLQNGKDMYTGDDLDIDYLSSYDIDHIIPQSFIKNNSIDNKVLTSQGANRGKLDNVPSEAIVRKMKGYWQSLLRAGAISKQKFDNLTKAERGGLTQVDKAGFIQRQLVETRQITKHVAQILDSRFNTEFDDHNKRIRKVHIITLKSKLVSDFRKEFGLYKIRDINHYHHAHDAYLNAVVAKAILGKYPQLAPEFVYGDYPKYNSFKERQKATQKMLFYSNILKFFKDQESLHVNSDGEEIWNANKHLPIIKNVLSIPQVNIVKKTEVQTGGFYKESILSKGNSDKLIPRKNNWDTRKYGGFDSPTVAYSVLVIAKMEKGKAKVLKPVKEMVGITIMERTAFEENPVVFLEARGYREIQEHLIIKLPKYSLFELENGRRRLLASSELQKGNELFLPVDYMTFLYLAAHYHELTGSSEDVLRKKYFVDRHLHYFDDIIQMINDFAERHILASSNLEKINHTYHNNSDLPVNERAENIINVFTFVALGAPAAFKFFDATIDRKRYTSTKEVLNATLIHQSVTGLYETRIDLSQLGEN

SEQ ID NO: 108 - protein, 1345 aa, Streptococcus equi
MKKPYTIALDIGTNSVGWVVVTDDYRVPTKKMKVLGNTERKTIKKNLIGALLFDSGDTAEGTRLKRTARRRYTRRKNRLRYLKEIFTEEMAKVDDGFFQRLEDSFYVLEDKEGNKHPIFANLADEVAYHKKYPTIYHLRKELVDNPQKADLRLIYLAVAHIIKFRGHFLIEGTLSSKNNNLQKSFDHLVDTYNLLFEEQLLTEGINAKELLSAALSKSKRLENLISLIPGQKKTGIFGNIIALSLGLTPNFKANFGLSKDVKLQLAKDTYADDLDSLLAQIGDQYADLFLAAKNLSDAILLSDILTESDEITRAPLSASMVKRYREHHKDLVTLKTLIKDQLPEKYQEIFLDKTKNGYAGYIEGQVSQEEFYKYLKPILARLDGSEPLLLKIDREDFLRKQRTFDNGSIPHQIHLEELHAILRRQEVFYPFLKDNRKKIESLLTFRIPYYVGPLARGHSRFAWVKRKFDGAIRPWNFEEIVDEEASAQIFIEKMTKNDLYLPNEKVLPKHSLLYETFTVYNELTKVKYATEGMTRPQFLSADQKQAIVDLLFKTNRKVTVKQLKENYFKKIECWDSVEITGVEDSFNASLGTYHDLLKIIQDKDFLDNPDNQKIIEDIILTLTLFEDKKMISKRLDQYAHLFDKVVLNKLERHHYTGWGRLSGKLINGIRDKQSGKTILDFLKDGFANRNFMQLIHDSELSFIDEIAKAQVIGKTEYSKDLVGNLASSPAIKKGISQTIKIVDELVKIMGYLPQQIVIEMARENQTTAQGIKNARQRMRKLEETAKKLGSNILKEHPVDNSQLQNDKRYLYYLQNGKDMYTGDDLDIDYLSSYDIDHIIPQSFIKNNSIDNKVLTSQGANRGKLDNVPSEAIVRKMKGYWQSLLRAGAISKQKFDNLTKAERGGLTQVDKAGFIQRQLVETRQITKHVAQILDSRFNTEFDDHNKRIRKVHIITLKSKLVSDFRKEFGLYKIRDINHYHHAHDAYLNAVVAKAILGKYPQLAPEFVYGDYPKYNSFKERQKATQKTLFYSNILKFFKDQESLHVNSDGEEIWNANKHLPIIKNVLSIPQVNIVKKTEVQTGGFYKESILSKGNSDKLIPRKNNWDTRKYGGFDSPTVAYSVLVIAKMEKGKAKVLKPVKEMVGITIMERIAFEENPVVFLEAKGYREIQEHLIIKLPKYSLFELENGRRRLLASSELQKGNELFLPVDYMTFLYLAAHYHELTGSSEDVLRKKYFVERHLHYFDDIIQMINDFAERHILASSNLEKINHTYHNNSDLPINERAENIINVFTFVALGAPAAFKFFDATIDRKRYTSTKEVLNATLIHQSVTGLYETRIDLSQLGEN

SEQ ID NO: 109 - protein, 1345 aa, Streptococcus equi
MKKPYTIALDIGTNSVGWVVVTDDYRVPTKKMKVLGNTERKTIKKNLIGALLFDSGDTAEGTRLKRTARPRYTRRKNRLRFLKEIFTEEMAKVDDGFFQRLEDSFYVLEDKEGNKHPIFANLADEVAYHKKYPTIYHLRKELVDNPQKADLRLIYLAVAHIIKFRGHFLIEGTLSSKNNNLQKSFDHLVDTYNLLFEEQLLTEGINAKELLSAALSKSKRLENLISLIPGQKKTGIFGNIIALSLGLTPNFKANFGLSKDVKLQLAKDTYADDLDSLLAQIGDQYADLFLAAKNLSDAILLSDILTESDEITRAPLSASMVKRYREHHKDLVTLKTLIKDQLPEKYQEIFLDKTKNGYAGYIEGQVSQEEFYKYLKPILARLDGSEPLLLKIDREDFLRKQRTFDNGSIPHQIHLEELHAILRRQEVFYPFLKDNRKKIESLLTFRIPYYVGPLARGHSRFAWVKRKFDGAIRPWNFEEIVDEEASAQIFIEKMTKNDLYLPNEKVLPKHSLLYETFTVYNELTKVKYATEGMTRPQFLSADQKQAIVDLLFKTNRKVTVKQLKENYFKKIECWDSVEITGVEDSFNASLGTYHDLLKIIQDKDFLDNPDNQKIIEDIILTLTLFEDKKMISKRLDQYAHLFDKVVLNKLERHHYTGWGRLSGKLINGIRDKQSGKTILDFLKDGFANRNFMQLIHDSELSFIDEIAKAQVIGKTEYSKDLVGNLAGSPAIKKGISQTIKIVDELVKIMGYLPQQIVIEMARENQTTAQGIKNARQRMRKLEETAKKLGSNILKEHPVDNSQLQNDKRYLYYLQNGKDMYTGDDLDIDYLSSYDIDHIIPQSFIKNNSIDNKVLTSQGANRGKLDNVPSEAIVRKMKGYWQSLLRAGAISKQKFDNLTKAERGGLTQVDKAGFIQLQLVETRQITKHVAQILDSRFNTEFDDHNKRIRKVHIITLKSKLVSDFRKEFGLYKIRDINHYHHAHDAYLNAVVAKAILGKYPQLAPEFVYGDYPKYNSFKERQKATQKTLFYSNILKFFKDQESLHVNSDGEEIWNANKHLPIIKNVLSIPQVNIVKKTEVQTGGFYKESILSKGNSDKLIPRKNNWDTRKYGGFDSPTVAYSVLVIAKMEKGKAKVLKPVKEMVGITIMERIAFEENPVVFLEAKGYREIQEHLIIKLPKYSLFELENGRRRLLASSELQKGNELFLPVDYMTFLYLAAHYHELTGSSEDVLRKKYFVERHLHYFDDIIQMINDFAERHILASSNLEKINHTYHNNSDLPVNERAENIINVFTFVALGAPAAFKFFDATIDRKRYTSTKEVLNATLIHQSVTGLYETRIDLSQLGEN

SEQ ID NO: 110 - protein, 1360 aa, Streptococcus equinus
MEKTYSIGLDIGTNSVGWAVITDDYKVPAKKMKVLGNTDKKYIKKNLLGALLFDSGETAEATRLKRAARRRYTRRKNRLRYLQEIFAKEMAKVDESFFQRLEESFLTDDDKTFDSHPIFGNKAEEDTYHQEFPTIYHLRKHLADSPEKVDLRLVYLALAHMIKFRGHFLIEGQLNAENTDVQKIFADFVGVYDRTFDDSHLSEITVDAASILTEKISKSRRLENLIKQYPTEKKNTLFGNLVALALGLQPNFKTNFKLSEDAKLQFSKDTYDEDLEELLGKIGDDYADLFTAAKNLYDAILLSGILTVDDNSTKAPLSASMIKRYEEHHEDLEKLKTFIKVNNFDKYHEIFKDKSKNGYAGYIENGVKQDIFYKHLKSIISEKNGGQYFLDKIEREDFLRKQRTFDNGSIPYQIHLQEMRTILRRQGEYYPFLKENQAKIEKILTFRIPYYVGPLARKNSRFAWAKYHSDEPITPWNFDEVVDKEKSAEKFITRMTLNDLYLPEEKVLPKHSYVYETFAVYNELTKIKYVNEQGKSFFFDANMKQEIFDHVFKENRKVTKAKLLSYLNNEFEEFRINDLIGLDKDSKSFNASLGTYHDLKKILDKSFLDDKTNEQIIEDIVLTLTLFEDRDMIHERLQKYSDIFTSQQLKKLERRHYTGWGRLSYKLINGIRNKENNKTILDFLIDDGDANRNFMQLINDDSLSFKTTIQEAQVVGDVDDIEAVVHDLPGSPAIKKGILQSVKIVDELVKVMGHNPQNIVIEMARENQITGYGRNRSNQRLKRLQDSLKPSYVDSKVENSHLQNDRLFLYYIQNGKDMYTGEELDIDHLSDYDIDHIIPQAFIKDNSIDNRVLTSSAKNRGKSDDVPSIEIVRNRKSYWYKLYKSGLISKRKFDNLTKAERGGLTETDKAGFIKRQLVETRQITKHVAQILDARFNTKCDENDKVIRDVKVITLKSSLVSQFRKEFKFYKVREINDYHHAHDAYLNAVVGTALLKKYPKLAPEFVYGEYKKYDVSSDNHSELGKATAKYFFYSNLMNFFKTEVKYADGRVFERPDIETNADGEVVWNKQRDFNIVRKVLSYPQVNIVKKVEVQTGGFSKESILPKGDSDKLIPRKTKKLQWETQKYGGFDSPTVAYSVLVVADVEKGKTRKLKTVKELVGISIMERSSFEENPVSFLEKKGYHNVQEDKLIKLPKYSLFEFEGGRRRLLASATELQKGNEVVLPQYMVNLLYHSQHVNNSHKPEHLNYVKQHKDEFKDIFNLIISIARINILKPKVVDNLINEFTEYGQEDISSLSESFINLLKFISFGAPGAFKFLKLDVKQSNLRYKSTTEALSATLIHQSVTGLYETRIDLSKLGEE

SEQ ID NO: 111 - protein, 1353 aa, Streptococcus gallolyticus
MTKKNYSIGLDIGTNSVGWAVITDDYKVPAKKMKVLGNTDKKYIKKNLLGALLFDSGETAEATRLKRTARRRYTRRKNRLRYLQEIFAEEMTKVDESFFYRLDESFLTTDEKDFERHPIFGNKAEEDAYHQKFPTIYHLRNYLADSSEKADLRLVYLALAHMIKYRGHFLIEGKLNAENTDVQKLFTDFVGVYDRTFDDSHLSEITVDVASTLTEKISKSRRLENLIKYYPTEKKNTLFGNLIALALGLQPNFKMNFKLSEDAKLQFSKDTYEEDLEELLGKIGDDYADLFTSAKNLYDAILLSGILTVDDNSTKAPLSASMIKRYVEHHEDLEKLKEFIKANKSELYHDIFKDKNKNGYAGYIENGVKQDEFYKYLKNTLSKIDGSDYFLDKIEREDFLRKQRTFDNGSIPHQIHLQEMHAILRRQGDYYPFLKEKQDRIEKILTFRIPYYVGPLVRKDSRFAWAEYRSDEKITPWNFDKVIDKEKSAEKFITRMTLNDLYLPEEKVLPKHSHVYETYAVYNELTKIKYVNEQGKESFFDSNMKQEIFDHVFKENRKVTKEKLLNYLNKEFPEYRIKDLIGLDKENKSFNASLGTYHDLKKILDKAFLDDKVNEEVIEDIIKTLTLFEDKDMIHERLQKYSDIFTANQLKKLERRHYTGWGRLSYKLINGIRNKENNKTILDYLIDDGSANRNFMQLINDDTLPFKQIIQKSQVVGDVDDIEAVVHDLPGSPAIKKGILQSVKIVDELVKVMGDNPDNIVIEMARENQTTNRGRSQSQQRLKKLQSSLKPSYIEDKVENSHLQNDQLFLYYIQNGKDMYTGDELDIDHLSDYDIDHIIPQAFIKDDSIDNRVLTSSAKNRGKSDDVPSLDIVRARKAEWVRLYKSGLISKRKFDNLTKAERGGLTEADKAGFIKRQLVETRQITKHVAQILDARFNTEHDENDKVIRDVKVITLKSNLVSQFRKDFEFYKVREINDYHHAHDAYLNAVVGTALLKKYPKLASEFVYGEYKKYDISSDKATAKYFFYSNLMNFFKTKVKYADGTVFERPIIETNADGEIAWNKQIDFEKVRKVLSYPQVNIVKKVETQTGGFSKESILPKGDSDKLIPRKTKKVYWDTKKYGGFDSPTVAYSVFVVADVEKGKAKKLKTVKELVGISIMERSFFEENPVEFLENKGYHNIREDKLIKLPKYSLFEFEGGRRRLLASASELQKGNEMVLPGYLVELLYHAHRADNFNSTEYLNYVSEHKKEFEKVLSCVEDFANLYVDVEKNLSKIRAVADSMDNFSIEEISNSFINLLTLTALGAPADFNFLGEKIPRKRYTSTKECLTATLIHQSITGLYETRIDLSKLGEE

SEQ ID NO: 112 - protein, 1354 aa, Streptococcus gallolyticus
MTEKNYSIGLDIGTNSVGWAVITDDYKVPAKKMKVLGNTDKKYIKKNLLGALLFDNGETAEATRLKRTARRRYTRRKNRLRYLQEIFAEEMAKVDESFFYRLDESFLTTDDKDFERHPIFGNKADEIKYHQEFPTIYHLRKHLADSHEKADLRLIYLALAHMIKFRGHFLIEGELNAENTDVQKLFEAFVEVYDRTFDDSNLSEITVDASSILTEKFSKSRRLENLIKHYPTEKKNTLFGNLVALALGLQPNFKTSFKLSEDAKLQFSKDTYEEDLEELIGKIGDEYADLFTSAKNLYDAILLSGILTVADNTTKAPLSASMIKRYNEHQVDLKKLKEFIKNNASDKYDEIFNDKDKNGYAGYIENGVKQDEFYKYLKTTLSKIDGSDYFLDKIEREDFLRKQRTFDNGSIPHQIHLQEMHAILRRQGEHYAFLKENQAKIEKILTFRIPYYVGPLARKNSRFAWAEYHSDEKITPWNFDEIIDKEKSAEKFITRMTLNDLYLPEEKVLPKHSLVYETYTVYNELTKVKYVNEQGKSNFFDANMKQEIFEHVFKENRKVTKDKFLNYLNKEFPEYRIQDLIGLDKENKSFNASLGTYHDLKKILDKSFLDDKTNETIIEDIIQTLTLFEDRDMIRQRLQKYSDIFTPQQLKKLERRHYTGWGRLSYKLINGIRNKENGKSILDYLIDDGYANRNFMQLISDDTLPFKQIIKDAQIIGDIDDVTSVVRELPGSPAIKKGILQSVKIVDELVKVMGHNPDNIVIEMARENQTTNRGRNQSQQRLKKLQDSLKPSYIEGKVENNHLQDDRLFLYYIQNGKDMYTGDELDIDHLSDYDIDHIIPQAFIKDDSIDNRVLTSSAKNRGKSDDVPSLDIVHDRKADWIRLYKSGLISKRKFDNLTKAERGGLTENDKAGFIKRQLVETRQITKHVAQILDSRFNTERDENDKVIRNVKVITLKSNLVSQFRKDFKFYKVREINDYHHAHDAYLNAVVGTALLKKYPKLAPEFVYGEYKKYDISGDKATAKYFFYSNLMNFFKRVIRYSNGKVVVRPVIECSKDTGEIAWNKQTDFEKVRRVLSYPQVNIVKKVETQTGGFSKESILPKGNSDKLIPRKTKKFRWDTPKYGGFDSPNIAYSVFVIADVEKGKAKKLKTVKELVGISIMERSSFEENPVVFLEKKGYQNVQEDNLIKLPKYSLFEFEGGRRRLLASASELQKGNEVVLSRHLVELLYHAHRVNSFNNSEHLKYVSEHKKEFGEVLSCVENFAKSYVDVEKNLGKIRAVADKIDTFSIEDISISFVNLLTLTALGAPADFNFLGEKIPRKRYTSTKECLNATLIHQSITGLYETRIDLSKLGEE

SEQ ID NO: 113 - protein, 1355 aa, Streptococcus gallolyticus; identical to SEQ ID NO: 12

SEQ ID NO: 114 - protein, 1358 aa, Streptococcus infantarius
MEKSYSIGLDIGTNSVGWAVITDDYKVPAKKMKVLGNTDKKYIKKNLLGALLFDSGETAEVTRLKRTARRRYTRRKNRLRYLQEIFAKEMTKVDESFFQRLEESFLTDDDKTFDSHPIFGNKAEEDAYHQKFPTIYHLRKYLADSQEKADLRLVYLALAHMIKYRGHFLIEGELNAENTDVQKLFNVFVETYDKIVDESHLSEIEVDASSILTEKVSKSRRLENLIKQYPTEKKNTLFGNLIALALGLQPNFKTNFKLSEDAKLQFSKDTYEEDLEELLGKVGDDYADLFISAKNLYDAILLSGILTVDDNSTKAPLSASMIKRYVEHHEDLEKLKEFIKINKLKLYHDIFKDKTKNGYAGYIDNGVKQDEFYKYLKTILTKIDDSDYFLDKIERDDFLRKQRTFDNGSIPHQIHLQEMHSILRRQGDYYPFLKENQAKIEKILTFRIPYYVGPLARKDSRFAWANYHSDEPITPWNFDEVVDKEKSAEKFITRMTLNDLYLPEEKVLPKHSHVYETFTVYNELTKIKYVNEQGESFFFDANMKQEIFDHVFKENRKVTKAKLLSYLNNEFEEFRINDLIGLDKDSKSFNASLGTYHDLKKILDKSFLDDKTNGQIIEDIVLTLTLFEDRDMIHERLQKYSDFFTSQQLKKLERRHYTGWGRLSYKLINGIRNKENNKTILDFLIDDGHANRNFMQLINDESLSFKTIIQEAQVVGDVDDIEAVVHDLPGSPAIKKGILQSVKIVDELVKVMGDNPDNIVIEMARENQTTGYGRNKSNQRLKRLQDSLKPSYVDSKVENSHLQNDRLFLYYIQNGKDMYTGEELDIDRLSDYDIDHIIPQAFIKDNSIDNKVLTSSAKNRGKSDDVPSIEIVRNRRSYWYKLYKSGLISKRKFDNLTKAERGGLTEADKAGFIKRQLVETRQITKHVAQILDARFNTKRDENDKVIRDVKVITLKSNLVSQFRKEFKFYKVREINDYHHAHDAYLNAVVGTALLKKYPKLTPEFVYGEYKKYDVSSDDYSEMGKATAKYFFYSNLMNFFKTEVKYADGRVFERPDIETNADGEVVWNKQKDFDIVRKVLSYPQVNIVKKVEAQTGGFSKESILSKGDSDKLIPRKTKKVYWNTKKYGGFDSPTVAYSVLVVADIEKGKAKKLKTVKELVGISIMERSFFEENPVSFLEKKGYHNVQEDKLIKLPKYSLFEFEGGRRRLLASATELQKGNEVMLPAHLVELLYHAHRIDSFNSTEHLKYVSEHKKEFEKVLSCVENFSNLYVDVEKNLSKVRAAAESMTNFSLEEISASFINLLTLTALGAPADFNFLGEKIPRKRYTSTKECLSATLIHQSVTGLYETRIDLSKLGEE

SEQ ID NO: 115 - protein, 1358 aa, Streptococcus iniae
MRKPYSIGLDIGTNSVGWAVITDDYKVPSKKMRIQGTTDRTSIKKNLIGALLFDNGETAEATRLKRTTRRRYTRRKYRIKELQKIFSSEMNELDIAFFPRLSESFLVSDDKEFENHPIFGNLKDEITYHNDYPTIYHLRQTLADSDQKADLRLIYLALAHIIKFRGHFLIEGNLDSENTDVHVLFLNLVNIYNNLFEEDVETASIDAEKILTSKTSKSRRLENLIAEIPNQKRNMLFGNLVSLALGLTPNFKTNFELLEDAKLQISKDSYEEDLDNLLAQIGDQYADLFIAAKKLSDAILLSDIITVKGASTKAPLSASMVQRYEEHQQDLALLKNLVKKQIPEKYKEIFDNKEKNGYAGYIDGKTSQEEFYKYIKPILLKLDGTEKLISKLEREDFLRKQRTFDNGSIPHQIHLNELKAIIRRQEKFYPFLKENQKKIEKLFTFKIPYYVGPLANGQSSFAWLKRQSNESITPWNFEEVVDQEASARAFIERMTNFDTYLPEEKVLPKHSPLYEMFMVYNELTKVKYQTEGMKRPVFLSSEDKEEIVNLLFKKERKVTVKQLKEEYFSKMKCFHTVTILGVEDRFNASLGTYHDLLKIFKDKAFLDDEANQDILEEIVWTLTLFEDQAMIERRLVKYADVFEKSVLKKLKKRHYTGWGRLSQKLINGIKDKQTGKTILGFLKDGVANRNFMQLINDSSLDFAKIIKNEQEKTIKNESLEETIANLAGSPAIKKGILQSIKIVDEIVKIMGQNPDNIVIEMARENQSTMQGIKNSRQRLRKLEEVHKNTGSKILKEYNVSNTQLQSDRLYLYLLQDGKDMYTGKELDYDNLSQYDIDHIIPQSFIKDNSIDNTVLTTQASNRGKSDNVPNIETVNKMKSFWYKQLKSGAISQRKFDHLTKAERGALSDFDKAGFIKRQLVETRQITKHVAQILDSRFNSNLTEDSKSNRNVKIITLKSKMVSDFRKDFGFYKLREVNDYHHAQDAYLNAVVGTALLKKYPKLEAEFVYGDYKHYDLPDSSLGKATTRMFFYSNLMNFFKKEIKLADDTIFTRPQIEVNTETGEIVWDKVKDMQTIRKVMSYPQVNIVMKTEVQTGGFSKESIWPKGDSDKLIARKKSWDPKKYGGFDSPIIAYSVLVVAKIAKGKTQKLKTIKELVGIKIMEQDEFEKDPIAFLEKKGYQDIQTSSIIKLPKYSLFELENGRKRLLASELQKGNELALPNKYVKFLYLASHYTKFTGKEEDREKKRSYVESHLYYFDEIMQIIVEYSNRYILADSNLIKIQNLYKEKDNFSIEEQAINMLNLFTFTDLGAPSAFKFFNGDIDRKRYSSTNEIINSTLIYQSPTGLYETRIDLSKLGGK

SEQ ID NO: 116 - protein, 1263 aa, Streptococcus iniae
  VARIANT 1257: note = Xaa can be any naturally occurring amino acid
MRKPYSIGLDIGTNSVGWAVITDDYKVPSKKMRIQGTTDRTSIKKNLIGALLFDNGETAEATRLKRTTRRRYTRRKYRIKELQKIFSSEMNELDIAFFPRLSESFLVSDDKEFENHPIFGNLKDEITYHNDYPTIYHLRQTLADSDQKADLRLIYLALAHIIKFRGHFLIEGNLDSENTDVHVLFLNLVNIYNNLFEEDVETASIDAEKILTSKTSKSRRLENLIAEIPNQKRNMLFGNLVSLALGLTPNFKTNFELLEDAKLQISKDSYEEDLDNLLAQIGDQYADLFIAAKKLSDAILLSDIITVKGASTKAPLSASMVQRYEEHQQDLALLKNLVKKQIPEKYKEIFDNKEKNGYAGYIDGKTSQEEFYKYIKPILLKLDGTEKLISKLEREDFLRKQRTFDNGSIPHQIHLNELKAIIRRQEKFYPFLKENQKKIEKLFTFKIPYYVGPLANGQSSFAWLKRQSNESITPWNFEEVVDQEASARAFIERMTNFDTYLPEEKVLPKHSPLYEMFMVYNELTKVKYQTEGMKRPVFLSSEDKEEIVNLLFKKERKVTVKQLKEEYFSKMKCFHTVTILGVEDRFNASLGTYHDLLKIFKDKAFLDDEANQDILEEIVWTLTLFEDQAMIERRLVKYADVFEKSVLKKLKKRHYTGWGRLSQKLINGIKDKQTGKTILGFLKDGVANRNFMQLINDSSLDFAKIIKNEQEKTIKNESLEETIANLAGSPAIKKGILQSIKIVDEIVKIMGQNPDNIVIEMARENQSTMQGIKNSRQRLRKLEEVHKNTGSKILKEYNVSNTQLQSDRLYLYLLQDGKDMYTGKELDYDNLSQYDIDHIIPQSFIKDNSIDNTVLTTQASNRGKSDNVPNIETVNKMKSFWYKQLKSGAISQRKFDHLTKAERGALSDFDKAGFIKRQLVETRQITKHVAQILDSRFNSNLTEDSKSNRNVKIITLKSKMVSDFRKDFGFYKLREVNDYHHAQDAYLNAVVGTALLKKYPKLEAEFVYGDYKHYDLPDSSLGKATTRMFFYSNLMNFFKKEIKLADDTIFTRPQIEVNTETGEIVWDKVKDMQTIRKVMSYPQVNIVMKTEVQTGGFSKESIWPKGDSDKLIARKKSWDPKKYGGFDSPIIAYSVLVVAKIAKGKTQKLKTIKELVGIKIMEQDEFEKDPIAFLEKKGYQDIQTSSIIKLPKYSLFELENGRKRLLASELQKGNELALPNKYVKFLYLASHYTKFTGKEEDREKKRSYVESHLYYFXEVKSSF

SEQ ID NO: 117 - protein, 1257 aa, Streptococcus iniae
  VARIANT 1255: note = Xaa can be any naturally occurring amino acid
  VARIANT 1257: note = Xaa can be any naturally occurring amino acid
MRKPYSIGLDIGTNSVGWAVITDDYKVPSKKMRIQGTTDRTSIKKNLIGALLFDNGETAEATRLKRTTRRRYTRRKYRIKELQKIFSSEMNELDIAFFPRLSESFLVSDDKEFENHPIFGNLKDEITYHNDYPTIYHLRQTLADSDQKADLRLIYLALAHIIKFRGHFLIEGNLDSENTDVHVLFLNLVNIYNNLFEEDVETASIDAEKILTSKTSKSRRLENLIAEIPNQKRNMLFGNLVSLALGLTPNFKTNFELLEDAKLQISKDSYEEDLDNLLAQIGDQYADLFIAAKKLSDAILLSDIITVKGASTKAPLSASMVQRYEEHQQDLALLKNLVKKQIPEKYKEIFDNKEKNGYAGYIDGKTSQEEFYKYIKPILLKLDGTEKLISKLEREDFLRKQRTFDNGSIPHQIHLNELKAIIRRQEKFYPFLKENQKKIEKLFTFKIPYYVGPLANGQSSFAWLKRQSNESITPWNFEEVVDQEASARAFIERMTNFDTYLPEEKVLPKHSPLYEMFMVYNELTKVKYQTEGMKRPVFLSSEDKEEIVNLLFKKERKVTVKQLKEEYFSKMKCFHTVTILGVEDRFNASLGTYHDLLKIFKDKAFLDDEANQDILEEIVWTLTLFEDQAMIERRLVKYADVFEKSVLKKLKKRHYTGWGRLSQKLINGIKDKQTGKTILGFLKDGVANRNFMQLINDSSLDFAKIIKNEQEKTIKNESLEETIANLAGSPAIKKGILQSIKIVDEIVKIMGQNPDNIVIEMARENQSTMQGIKNSRQRLRKLEEVHKNTGSKILKEYNVSNTQLQSDRLYLYLLQDGKDMYTGKELDYDNLSQYDIDHIIPQSFIKDNSIDNTVLTTQASNRGKSDNVPNIETVNKMKSFWYKQLKSGAISQRKFDHLTKAERGALSDFDKAGFIKRQLVETRQITKHVAQILDSRFNSNLTEDSKSNRNVKIITLKSKMVSDFRKDFGFYKLREVNDYHHAQDAYLNAVVGTALLKKYPKLEAEFVYGDYKHYDLPDSSLGKATTRMFFYSNLMNFFKKEIKLADDTIFTRPQIEVNTETGEIVWDKVKDMQTIRKVMSYPQVNIVMKTEVQTGGFSKESIWPKGDSDKLIARKKSWDPKKYGGFDSPIIAYSVLVVAKIAKGKTQKLKTIKELVGIKIMEQDEFEKDPIAFLEKKGYQDIQTSSIIKLPKYSLFELENGRKRLLASELQKGNELALPNKYVKFLYLASHYTKFTGKEEDREKKRSYVESHLYXFX

SEQ ID NO: 118 - protein, 199 aa, Streptococcus iniae
MEQDEFEKDPIAFLEKKGYQDIQTSSIIKLPKYSLFELENGRKRLLASKELQKGNELALPNKYVKFLYLASHYTKFTGKEEDREKKRSYVESHLYYFDEIMQIIVEYSNRYILADSNLIKIQNLYKEKDNFSIEEQAINMLNLFTFTDLGAPSAFKFFNGDIDRKRYSSTNEIINSTLIYQSPTGLYETRIDLSKLGGK

SEQ ID NO: 119 - protein, 1271 aa, Streptococcus iniae
MRKPYSIGLDIGTNSVGWAVITDDYKVPSKKMRIQGTTDRTSIKKNLIGALLFDNGETAEATRLKRTTRRRYTRRKYRIKELQKIFSSEMNELDIAFFPRLSESFLVSDDKEFENHPIFGNLKDEITYHNDYPTIYHLRQTLADSDQKADLRLIYLALAHIIKFRGHFLIEGNLDSENTDVHVLFLNLVNIYNNLFEEDVETASIDAEKILTSKTSKSRRLENLIAEIPNQKRNMLFGNLVSLALGLTPNFKTNFELLEDAKLQISKDSYEEDLDNLLAQIGDQYADLFIAAKKLSDAILLSDIITVKGASTKAPLSASMVQRYEEHQQDLALLKNLVKKQIPEKYKEIFDNKEKNGYAGYIDGKTSQEEFYKYIKPILLKLDGTEKLISKLEREDFLRKQRTFDNGSIPHQIHLNELKAIIRRQEKFYPFLKENQKKIEKLFTFKIPYYVGPLANGQSSFAWLKRQSNESITPWNFEEVVDQEASARAFIERMTNFDTYLPEEKVLPKHSPLYEMFMVYNELTKVKYQTEGMKRPVFLSSEDKEEIVNLLFKKERKVTVKQLKEEYFSKMKCFHTVTILGVEDRFNASLGTYHDLLKIFKDKAFLDDEANQDILEEIVWTLTLFEDQAMIERRLVKYADVFEKSVLKKLKKRHYTGWGRLSQKLINGIKDKQTGKTILGFLKDGVANRNFMQLINDSSLDFAKIIKNEQEKTIKNESLEETIANLAGSPAIKKGILQSIKIVDEIVKIMGQNPDNIVIEMARENQSTMQGIKNSRQRLRKLEEVHKNTGSKILKEYNVSNTQLQSDRLYLYLLQDGKDMYTGKELDYDNLSQYDIDHIIPQSFIKDNSIDNTVLTTQASNRGKSDNVPNIETVNKMKSFWYKQLKSGAISQRKFDHLTKAERGALSDFDKAGFIKRQLVETRQITKHVAQILDSRFNSNLTEDSKSNRNVKIITLKSKMVSDFRKDFGFYKLREVNDYHHAQDAYLNAVVGTALLKKYPKLEAEFVYGDYKHYDLPDSSLGKATTRMFFYSNLMNFFKKEIKLADDTIFTRPQIEVNTETGEIVWDKVKDMQTIRKVMSYPQVNIVMKTEVQTGGFSKESIWPKGDSDKLIARKKSWDPKKYGGFDSPIIAYSVLVVAKIAKGKTQKLKTIKELVGIKIMEQDEFEKDPIAFLEKKGYQDIQTSSIIKLPKYSLFELENGRKRLLASELQKGNELALPNKYVKFLYLASHYTKFTGKEEDREKKRSYVESHLYYFDVRLSQVFRVTNVEF

SEQ ID NO: 120 - protein, 1345 aa, Streptococcus intermedius
MKKPYSIGLDIGTNSVGWAVVTDDYKVPAKKMKVLGNTDKSHIKKNLLGALLFDSGNTAEDRRLKRTARRRYTRRRNRILYLQEIFSEEMGKVDDSFFHRLEDSFLVTEDKRGERHPIFGNLEEEVKYHENFPTIYHLRQYLADNPEKTDLRLVYLALAHIIKFRGHFLIEGKFDTRNNDVQRLFQEFLAVYDNTFENSSLQEQNVQVEEILTDKISKSAKKDRVLKLFPNEKSNGRFAEFLKLIVGNQADFKKHFELEEKAPLQFSKDTYEEELEVLLAQIEDNYAELFLSAKKLYDSILLSGILTVTDVSTKAPLSASMIQRYNEHQMDLAQLKQFIRQKLSDKYNEVFSDVSKDGYAGYIDGKTNQEAFYKYLKGLLNKIEGSGYFLDKIEREDFLRKQRTFDNGSIPHQIHLQEMRAIIRRQAEFYPFLADNQDRIEKILTFRIPYYIGPLARGKSDFSWLSRKSADKITPWNFDEIVDKESSAEAFINRMTNYDLYLPNQKVLPRHSLLYEKFTVYNELTKVKYKTEQGKTAFFDANMKQEIFDGVFKVYRKVTKDKLMDFLEKEFDEFRIVDLTGLDKENKAFNASYGTYHDLRKILDKDFLDNSKNEKILEDIVLTLTLFEDREMIRKRLENYSDLLTKEQVKNLERRHYTGWGRLSAELIHGIRNKESRKTILDYLIDDGNSNRNFMQLINDDALSFKEEIAKAQVIGETDNLNQVVSDIAGSPAIKKGILQSLKIVDELVKIMGHQPENIVVEMARENQFTNQGRRNSQQRLKGLTDSIKEFGSQILKEHPVENSQLQNDRLFLYYLQNGRDMYTGEELDIDYLSQYDIDHIIPQAFIKDNSIDNRVLTSSKENRGKSDDVPSKDVVRKMKSYWSKLLSAKLITQRKFDNLTKAERGGLTDDDKAGFIKRQLVETRQITKHVARILDERFNTETDENNKKIRQVKIVTLKSNLVSNFRKEFELYKVREINDYHHAHDAYLNAVIGKALLGVYPQLEPEFVYGDYPHFHGHKENKATAKKFFYSNIMNFFKKDDVRTDKNGEIIWKKDEHISNIKKVLSYPQVNIVKKVEEQTGGFSKESILPKGNSDKLIPRKTKKFYWDTKKYGGFDSPIVAYSILVIANIEKGKSKKLKLVKDLVGITIMERTIFEKNPVAFLERKGYRNVQEENIVKLPKYSLFELENGRRRLLASARELQKGNEIVLPNHLGTMLYHAKNIHKVDEPKHLDYVKKHKDEFKELLDVVSNFSKKNILAESNLEKIEELYAQNNNKDITELASSFINLLTFTAIGAPAAFKFFDNNIDRKRYTSTTEILNATLIHQSITGLYETRIDLSRLGGD

SEQ ID NO: 121 - protein, 1333 aa, Streptococcus massiliensis
MKKPYSIGLDIGTNSVGWAVVMEDYKVPSKKMKVLGNTDKQSIKKNLIGALLFDSGETAVERRLNRTTSRRYDRRRNRIRYLQHIFAEEMNRADENFFHRLKESFFVEEDKTYSKYPIFGTLEEEKNYHKNYPTIYHLRKTLADTPDKMDIRLIYLALAHIIKYRGHFLIEGDLDIENIGIQDSFKSFIEEYNTQFGTKLDSTTKVEAIFTENSSKAKRVETILGLFPDETAAGNLDKFLKLMLGNQADFKKVFDLEEKITLQFSKDSYEEDLELLLSKIDEEYAALFDLAKKVYDAVLLSNILTVKEKNTKAPLSASMIKRYEEHKDDLKAFKRFFRERLPEKYETMFKDLTKPSYAAYVSGAVTEDDFYKFSKGLLIDVEGAEYFLEKIEREDFLRKQRTFDNGAIPNQVHVKELQAIILNQSKYYPFLAENKEKIEKILTFRIPYYVGPLARGNSSFAWLQRKSDEAIRPWNFEQVVDMETSASRFIERMTLHDLYLPDEKVLPRHSLIYEKYTVFNELTKVRFTPEGGKEVYFSKTDKENIFDSLFKRYRKVTKRKLKDFIEKELGYGYIDIDNIKGVEEQFNASYTTYQDLLKIIGDKEFLDNEENKDLLEEIIYILTVFEDRKMIEKRLSELNIPFENKIIKKLARKKYTGWGNLSRKLIDGIRNRETNRTILGHLIDDGFSNRNLMQLINDDGLDFKEIIRKAQTIENIDTNQALVSSLPGSPAIKKGILQSLNIVDEIIAIMGYAPTNIVIEMARENQTTQKGRDNSAQRLKKIEDGIKLGSDLLKQNPIQDNKDLQKEKLFLYYMQNGIDLYTGQPLNCDPDSLAFYDVDHIVPRSYIKNDSFDNKVLTTSKGNRKKLDDVPAKEVVEKMENTWRRLHAAGLISDIKLSYLMKGELTEEDKAGFIRRQLVETRQITKHVARLLDEKLNRKKNENGEKLRTTKIITLKSVFASRFRANFDLYKLRELNHYHHAHDAYLNAVVAQALLKVYPKFERELVYGSYVKESIFSRKATERMRMYNNILKFISKDKKDQETGEIVWDKKEIENIVKKVIYSSPVNIVKKREEQSGALFKQSNMAVGYNNKLIPRKKDWSVDKYGGFIEPAESYSLAIFYTDINGKKPKKKSTIIAISRMEKKDYEKEPERFLAQKGFERVEKTIKLPKYSLFEMEKGRRRLLASSGELQKGNQVLLPEHLIRLLSYAKKVDVLVKSKDDDYDLEEHRAEFAELLDCIKKFNDMYILASSNMSKIEEIYQKNIDAPIEEVARSFVLLNFTMMGAATDFKFFGQIIPRKRYPSTTECLKSTLIHQSVTGLYETRIDLSKLGEN

SEQ ID NO: 122 - protein, 1361 aa, Streptococcus mitis
NNKPYSIGLDIGTNSVGWAVITDDYKVPSKKMKVLGNTDKHFIKKNLLGALLFDEGTTAEDRRLKRTARRRYTRRKNRLRYLQEIFTEEMSKVDISFFHRLDDSFLVPEDKRGSKYPIFATLEEEKEYHKNFPTIYHLRKHLADSKEKADFRLIYLALAHIIKYRGHFLYEESFDIKNNDIQKIFNEFISIYDNTFEGSSLNGQNAQVEAIFTDKISKSAKRERVLKLFPDEKSTGLFSEFLKLIVGNQADFKKHFDLEEKAPLQFSKDTYDEDLENLLVQIGDDFADLFLVAKKLYDAILLSGILTVTDPSTKAPLSASMIDRYENHQKDLAALKQFIKTNLPEKYDEVFSDQSKDGYAGYIDGKTTQEAFYKYIKNLLSKLEGADYFLDKIEREDFLRKQRTFDNGSIPHQIHLQEMNAIIRRQGEHYPFLQENKEKIEKILTFRIPYYVGPLARGNRDFAWLTRNSDQAIRPWNFEEIVDKARSAEDFINKMTNYDLYLPEEKVLPKHSLLYETFAVYNELTKVKFIAEGLRDYQFLDSGQKQQIVTQLFKEKRKVTEKDIIQYLHNVDSYDGIELKGIEKQFNASLSTYHDLLKIIKDKEFMDDSKNEAILENIVHTLTIFEDREMIKQRLAHYASIFDEKVIKALTRRHYTGWGKLSAKLINGIYDKQSKKTILDYLIDDGEINRNFMQLINDDGLSFKEIIQKAQVVGKTNDVKQVVQELPGSPAIKKGILQSIKLVDELVKVMGHAPESIVIEMARENQTTARGKKNSQQRYKRIEDALKNLAHNILKEHPTDNIQLQNDRLFLYYLQNGKDMYTGKSLDINQLSSCDIDHIIPQAFIKDDSLDNRVLTSSKDNRGKSDNVPSLEIVQKRKAFWQQLLDSKLISERKFNNLTKAERGGLDERDKVGFIKRQLVETRQITKHVAQILDARFNTEVTEKDKKDRSVKIITLKSNLVSNFRKEFRLYKVREINDYHHAHDPYLNAVVAKAILKKYPKLEPEFVYGDYQKYDLTKDPKEVEKATEKYFFYSNLLNFFKEEVHYADGTIVKRENIEYSKDTGEIAWNKEKDFATIKKVLSLPQVNIVKKTEEQTGGLFDNNIVSKKKVVDASKLTPIKSGLSPEKYGGYARPTIAYSVLVIADIEKGKAKKLKRIKEMVGITVQDKKKFEANPIAYLEECGYKNINPNLIIKLPKYSLFEFNNGQRRLLASSIELQKGNELIVPYHFTALLYHAQRINKISEPIHKQYVETHQSEFKELLTAIISLSKKYIQKPNVESLLQQAFDQSDKDIYQLSESFISLLKLISFGAPGTFKFLGVEISQSNVRYQSVSSCFNATLIHQSITGLYETRIDLSKLGED

SEQ ID NO: 123 - protein, 1359 aa, Streptococcus mitis; identical to SEQ ID NO: 13

SEQ ID NO: 124 - protein, 1345 aa, Streptococcus mutans
MKKPYSIGLDIGTNSVGWAVVTDDYKVPAKKMKVLGNTDKSHIEKNLLGALLFDSGNTAEDRRLKRTARRRYTRRRNRILYLQEIFSEEMGKVDDSFFHRLEDSFLVTEDKRGERHPIFGNLEEEVKYHENFPTIYHLRQYLADNPEKVDLRLVYLALAHIIKFRGHFLIEGKFDTRNNDVQRLFQEFLAVYDNTFENSSLQEQNVQVEEILTDKISKSAKKDRVLKLFPNEKSNGRFAEFLKLIVGNQADFKKHFELEEKAPLQFSKDTYEEELEVLLAQIGDNYAELFLSAKKLYDSILLSGILTVTDVGTKAPLSASMIQRYNEHQMDLAQLKQFIRQKLSDKYNEVFSDVSKDGYAGYIDGKTNQEAFYKYLKGLLNKIEGSGYFLDKIEREDFLRKQRTFDNGSIPHQIHLQEMRAIIRRQAEFYPFLADNQDRIEKLLTFRIPYYVGPLARGKSDFAWLSRKSADKITPWNFDEIVDKESSAEAFINRMTNYDLYLPNQKVLPKHSLLYEKFTVYNELTKVKYKTEQGKTAFFDANMKQEIFDGVFKVYRKVTKDKLMDFLEKEFDEFRIVDLTGLDKENKVFNASYGTYHDLCKILDKDFLDNSKNEKILEDIVLTLTLFEDREMIRKRLENYSDLLTKEQVKKLERRHYTGWGRLSAELIHGIRNKESRKTILDYLIDDGNSNRNFMQLINDDALSFKEEIAKAQVIGETDNLNQVVSDIAGSPAIKKGILQSLKIVDELVKIMGHQPENIVVEMARENQFTNQGRRNSQQRLKGLTDSIKEFGSQILKEHPVENSQLQNDRLFLYYLQNGRDMYTGEELDIDYLSQYDIDHIIPQAFIKDNSIDNRVLTSSKENRGKSDDVPSKDVVRKMKSYWSKLLSAKLITQRKFDNLTKAERGGLTDDDKAGFIKRQLVETRQITKHVARILDERFNTETDENNKKIRQVKIVTLKSNLVSNFRKEFELYKVREINDYHHAHDAYLNAVIGKALLGVYPQLEPEFVYGDYPHFHGHKENKATAKKFFYSNIMNFFKKDDVRTDKNGEIIWKKDEHISNIKKVLSYPQVNIVKKVEEQTGGFSKESILPKGNSDKLIPRKTKKFYWDTKKYGGFDSPIVAYSILVIADIEKGKSKKLKTVKALVGVTIMEKMTFERDPVAFLERKGYRNVQEENIIKLPKYSLFKLENGRKRLLASARELQKGNEIVLPNHLGTLLYHAKNIHKVDEPKHLDYVDKHKDEFKELLDVVSNFSKKYTLAEGNLEKIKELYAQNNGEDLKELASSFINLLTFTAIGAPATFKFFDKNIDRKRYTSTTEILNATLIHQSITGLYETRIDLNKLGGD

SEQ ID NO: 125 - protein, 1345 aa, Streptococcus mutans
MKKPYSIGLDIGTNSVGWAVVTDDYKVPAKKMKVLGNTDKSHIEKNLLGALLFDSGNTAEDRRLKRTARRRYTRRRNRILYLQEIFSEEMGKVDDSFFHRLEDSFLVTEDKRGERHPIFGNLEEEVKYHENFPTIYHLRQYLADNPEKVDLRLVYLALAHIIKFRGHFLIEGKFDTRNNDVQRLFQEFLAVYDNTFENSSLQEQNVQVEEILTDKISKSAKKDRVLKLFPNEKSNGRFAEFLKLIVGNQADFKKHFELEEKAPLQFSKDTYEEELEVLLAQIGDNYAELFLSAKKLYDSILLSGILTVTDVGTKAPLSASMIQRYNEHQMDLAQLKQFIRQKLSDKYNEVFSDVSKDGYAGYIDGKTNQEAFYKYLKGLLNKIEGSGYFLDKIEREDFLRKQRTFDNGSIPHQIHLQEMRAIIRRQAEFYPFLADNQDRIEKLLTFRIPYYVGPLARGKSDFAWLSRKSADKITPWNFDEIVDKESSAEAFINRMTNYDLYLPNQKVLPKHSLLYEKFTVYNELIKVKYKTEQGKTAFFDANMKQEIFDGVFKVYRKVTKDKLMDFLEKEFDEFRIVDLTGLDKENKVFNASYGTYHDLCKILDKDFLDNSKNEKILEDIVLTLTLFEDREMIRKRLENYSDLLTKEQVKKLERRHYTGWGRLSAELIHGIRNKESRKTILDYLIDDGNSNRNFMQLINDDALSFKEEIAKAQVIGETDNLNQVVSDIAGSPAIKKGILQSLKIVDELVKIMGHQPENIVVEMARENQFTNQGRRNSQQRLKGLTDSIKEFGSQILKEHPVENSQLQNDRLFLYYLQNGRDMYTGEELDIDYLSQYDIDHIIPQAFIKDNSIDNRVLTSSKENRGKSDDVPSKDVVRKMKSYWSKLLSAKLITQRKFDNLTKAERGGLTDDDKAGFIKRQLVETRQITKHVARILDERFNTETDENNKKIRQVKIVTLKSNLVSNFRKEFELYKVREINDYHHAHDAYLNAVIGKALLGVYPQLEPEFVYGDYPHFHGHKENKATAKKFFYSNIMNFFKKDDVRTDKNGEIIWKKDEHISNIKKVLSYPQVNIVKKVEEQTGGFSKESILPKGNSDKLIPRKTKKFYWDTKKYGGFDSPIVAYSILVIADIEKGKSKKLKTVKALVGVTIMEKMTFERDPVAFLERKGYRNVQEENIIKLPKYSLFKLENGRKRLLASARELQKGNEIVLPNHLGTLLYHAKNIHKVDEPKHLDYVDKHKDEFKELLDVVSNFSKKYTLAEGNLEKIKELYAQNNGEDLKELASSFINLLTFTAIGAPATFKFFDKNIDRKRYTSTTEILNATLIHQSITGLYETRIDLNKLGGD

SEQ ID NO: 126 - protein, 1345 aa, Streptococcus mutans
MKKPYSIGLDIGTNSVGWAVVTDDYKVPAKKMKVLGNTDKSHIKKNLLGALLFDSGNTAEDRRLKRTARRRYTRRRNRILYLQEIFSEEMGKVDDSFFHRLDESFLTDDDKNFDSYPIFGNKAEEDAYHQKFPTIYHLRKHLADSTEKADLRLVYLALAHMIKFRGHFLIEGELNAENTDVQKLFADFVGVYDRTFDDSHLSEITVDASSILTEKISKSRRLEKLINNYPKEKKNTLFRNLVALSLGLQPNFKTNFKLSEDAKLQFSKDTYEEDLEELLGKIGDDYADLFTLAKNLYDAILLSGILTADDSSTKAPLSASMIKRYAEHHEDLEKLKEFIKANKPELYHDIFKDETKNGYAGYIENGVKQDEFYKYLKNTLSKIAGSDYFLDKIEREDFLRKQRTFDNGSIPHQIHLQEMHAILRRQGDYYPFLKENQDRIEKILTFRIPYYVGPLARGKSDFAWLSRKSADKITPWNFDEIVDKESSVEAFINRMTNYDLYLPNQKVLPKHSLLYEKFTVYNELTKVKYKTEQGKTAFFDANMKQEIFDGVFKVYRKVTKDKLMDFLEKEFDEFRIVDLTGLDKENKAFNASYGTYHDLRKILDKDFLDNSKNEKILEDIVLTLTLFEDREMIRKRLKNYSDLLTKEQLKKLERRHYTGWGRLSAELIHGIRNKESRKTILDYLIDDGNSNRNFMQLINDDALSFKEEIAKAQVIGETDNLNQVVSDIAGSPAIKKGILQSLKIVDELVKIMGHQPENIVVEMARENQFTNQGRRNSQQRLKGLTDSIKEFGSQILKEHPVENSQLQNDRLFLYYLQNGRDMYTGEELDIDYLSQYDIDHIIPQAFIKDNSIDNRVLTSSKENRGKSDDVPSKDVVRKMKSYWSKLLSAKLITQRKFDNLTKGERGGLTDDDKAGFIKRQLVETRQITKHVARILDERFNTETDENNKKIRQVKIVTLKSNLVSNFRKEFELYKVREINDYHHAHDAYLNAVIGKALLGVYPQLEPEFVYGDYPHFHGHKENKATAKKFFYSNIMNFFKKDDVRTDKNGEIIWKKDEYISNIKKVLSYPQVNIVKKVEEQTGGFSKESILPKGDSDKLIPRKTKKFYWDTKKYGGFDSPIVAYSILVIADIEKGKSKKLKTVKALVGVTIMEKMTFERDPVAFLERKGYRNVQEENIIKLPKYSLFKLENGRKRLLASARELQKGNEIVLPNHLGTLLYHAKNIHKVDEPKHLDYVDKHKDEFKELLDVVSNFSKKYTLAEGNLEKIKELYAQNNGEDLKELASSFINLLTFTAIGAPATFKFFDKNIDRKRYTSTTEILNATLIHQSITGLYETRIDLSKLGGD

SEQ ID NO: 127 - protein, 1345 aa, Streptococcus mutans
MKKPYSIGLDIGTNSVGWAVVTDDYKVPAKKMKVLGNTDKSHIKKNLLGALLFDSGNTAEDRRLKRTARRRYTRRRNRILYLQEIFSEEMGKVDDSFFHRLEDSFLVTEDKRGERHPIFGNLEEEVKYHENFPTIYHLRQYLADNPEKTDLRLVYLALAHIIKFRGHFLIEGKFDTRNNDVQRLFQEFLAVYDNTFENSSLQEQNVQVEEILTDKISKSAKKDRVLKLFPNEKSNGRFAEFLKLIVGNQADFKKHFELEEKAPLQFSKDIYEEELEVLLAQIGDNYAELFLSAKKLYDSILLSGILTVTDVSTKAPLSASMIQRYNEHQMDLAQLKQFIRQKLSDKYNEVFSDVSKDGYAGYIDGKTNQEAFYKYLKGLLNKIEGSGYFLDKIEREDFLRKQRTFDNGSIPHQIHLQEMRAIIRRQAEFYPFLADNQDRIEKILTFRIPYYVGPLARGKSDFAWLSRKSADKITPWNFDEIVDKESSVEAFINRMTNYDLYLPNQKVLPKHSLLYEKFTVYNELTKVKYKTEQGKTAFFDANMKQEIFDGVFKVYRKVTKDKLMDFLEKEFDEFRIVDLTGLDKENKAFNASYGTYHDLRKILDKDFLDNSKNEKILEDIVLTLTLFEDREMIRKRLKNYSDLLTKEQLKKLERRHYTGWGRLSAELIHGIRNKESRKTILDYLIDDGNSNRNFMQLINDDALSFKEEIAKAQVIGETDNLNQVVSDIAGSPAIKKGILQSLKIVDELVKIMGHQPENIVVEMARENQFTNQGRRNSQQRLKGLTDSIKEFGSQILKEHPVENSQLQNDRLFLYYLQNGRDMYTGEELDIDYLSQYDIDHIIPQAFIKDNSIDNRVLTSSKENRGKSDDVPSKDVVRKMKSYWSKLLSAKLITQRKFDNLTKAERGGLTDDDKAGFIKRQLVETRQITKHVARILDERFNTETDENNKKIRQVKIVTLKSNLVSNFRKEFELYKVREINDYHHAHDAYLNAVIGKALLGVYPQLEPEFVYGDYPHFHGHKENKATAKKFFYSNIMNFFKKDDVRTDKNGEIIWKKDEHISNIKKVLSYPQVNIVKKVEEQTGGFSKESILPKGNSDKLIPRKTKKFYWDTKKYGGFDSPIVAYSILVIADIEKGKSKKLKTVKALVGVTIMEKMTFERDPVAFLERKGYRNVQEENIIKLPKYSLFKLENGRKRLLASARELQKGNEIVLPNHLGTLLYHAKNIHKVDEPKHLDYVDKHKDEFKELLDVVSNFSKKYTLAEGNLEKIKELYAQNNGEDLKELASSFINLLTFTAIGAPATFKFFDKNIDRKRYTSTTEILNATLIHQSITGLYETRIDLNKLGGD

SEQ ID NO: 128 - protein, 1345 aa, Streptococcus mutans
MKKPYSIGLDIGTNSVGWAVVTDDYKVPAKKMKVLGNTDKSHIKKNLLGALLFDSGNTAEDRRLKRTARRRYTRRRNRILYLQEIFSEEMGKVDDSFFHRLEDSFLVTEDKRGERHPIFGNLEEEVKYHENFPTIYHLRQYLADNPEKVDLRLVYLALAHIIKFRGHFLIEGKFDTRNNDVQRLFQEFLAVYDNTFENSSLQEQNVQVEEILTDKISKSAKKDRVLKLFPNEKSNGRFAEFLKLIVGNQADFKKHFELEEKAPLQFSKDTYEEELEVLLAQIGDNYAELFLSAKKLYDSILLSGILTVTDVSTKAPLSASMIQRYNEHQMDLAQLKQFIRQKLSDKYNEVFSDVSKDGYAGYIDGKTNQEAFYKYLKGLLNKIEGSGYFLDKIEREDFLRKQRTFDNGSIPHQIHLQEMRAIIRRQAEFYPFLADNQDRIEKILTFRIPYYVGPLARGKSDFAWLSRKSADKITPWNFDEIVDKESSAEAFINRMTNYDLYLPNQKVLPKHSLLYEKFTVYNELTKVKYKTEQGKTAFFDANMKQEIFDGVFKVYRKVTKDKLMDFLEKEFDEFRIVDLTGLDKENKVFNASYGTYHDLCKILDKDFLDNSKNEKILEDIVLTLTLFEDREMIRKRLENYSDLLTKEQVKKLERRHYTGWGRLSAELIHGIRNKESRKTILDYLIDDGNSNRNFMQLINDDALSFKEEIAKAQVIGETDNLNQVVSDIAGSPAIKKGILQSLKIVDELVKIMGHQPENIVVEMARENQFTNQGRQNSQQRLKGLTDSIKEFGSQILKEHPVENSQLQNDRLFLYYLQNGRDMYTGEELDIDYLSQYDIDHIIPQAFIKDNSIDNRVLTSSKENRGKSDDVPSEDVVRKMKSYWSKLLSAKLITQRKFDNLTKAERGGLTDDDKAGFIKRQLVETRQITKHVARILDERFYTETDENNKKIRQVKIVTLKSNLVSNFRKEFELYKVREINDYHHAHDAYLNAVIGKALLGVYPQLEPEFVYGDYPHFHGHKENKATAKKFFYSNIMNFFKKDDVRTDKNGEIIWKKDEHISNIKKVLSYPQVNIVKKVEEQTGGFSKESILPKGNSDKLIPRKTKKFYWDTKKYGGFDSPIVAYSILVIADIEKGKSKKLKTVKALVGVTIMEKMTFERDPVAFLERKGYRNVQEENIIKLPKYSLFKLENGRKRLLASARELQKGNEIVLPNHLGTLLYHAKNIHKVDEPKHLDYVDKHKDEFKELLDVVSNFSKKYTLAEGNLEKIKELYAQNNGEDLKELASSFINLLTFTAIGAPATFKFFDKNIDRKRYTSTTEILNATLIHQSITGLYETRIDLSKLGGD

SEQ ID NO: 129 - protein, 1345 aa, Streptococcus mutans
MKKPYSIGLDIGTNSVGWAVVTDDYKVPAKKMKVLGNTDKSHIKKNLLGALLFDSGNTAEDRRLKRTARRRYTRRRNRILYLQEIFSEEMGKVDDSFFHRLEDSFLVTEDKRGERHPIFGNLEEEVKYHENFPTIYHLRQYLADNPEKVDLRLVYLALAHIIKFRGHFLIEGKFDTRNNDVQRLFQEFLAVYDNTFENSSLQEQNVQVEEILTDKISKSAKKDRVLKLFPNEKSNGRFAEFLKLIVGNQADFKKHFELEEKAPLQFSKDTYEEDLEELLGKIGDDYADLFTLAKNLYDAILLSGILTADDSSTKAPLSASMIQRYNEHQMDLAQLKQFIRQKLSDKYNEVFSDVSKDGYAGYIDGKTNQEAFYKYLKGLLNKIEGSGYFLDKIEREDFLRKQRTFDNGSIPHQIHLQEMRAIIRRQAEFYPFLADNQDRIEKILTFRIPYYVGPLARGKSDFAWLSRKSADKITPWNFDEIVDKESSAEAFINRMTNYDLYLPNQKVLPKHSLLYEKFTVYNELTKVKYKTEQGKTAFFDANMKQEIFDGVFKVYRKVTKDKLMDFLEKEFDEFRIVDLTGLDKENKVFNASYGTYHDLCKILDKDFLDNSKNEKILEDIVLTLTLFEDREMIRKRLENYSDLLTKEQVKKLERRHYTGWGRLSAELIHGIRNKESRKTILDYLIDDGNSNRNFMQLINDDALSFKEEIAKAQVIGETDNLNQVVSDIAGSPAIKKGILQSLKIVDELVKIMGHQPENIVVEMARENQFTNQGRRNSQQRLKGLTDSIKEFGSQILKEHPVENSQLQNDRLFLYYLQNGRDMYTGEELDIDYLSQYDIDHIIPQAFIKDNSIDNRVLTSSKENRGKSDDVPSKDVVRKMKSYWSKLLSAKLITQRKFDNLTKAERGGLTDDDKAGFIKRQLVETRQITKHVARILDERFYTETDENNKKIRQVKIVTLKSNLVSNFRKEFELYKVREINDYHHAHDAYLNAVIGKALLGVYPQLEPEFVYGDYPHFHGHKENKATAKKFFYSNIMNFFKKDDVRTDKNGEIIWKKDEHISNIKKVLSYPQVNIVKKVEEQTGGFSKESILPKGNSDKLIPRKTKKFYWDTKKYGGFDSPIVAYSILVIADIEKGKSKKLKTVKALVGVTIMEKMTFERDPVAFLERKGYRNVQEENIIKLPKYSLFKLENGRKRLLASARELQKGNEIVLPNHLGTLLYHAKNIHKVDEPKHLDYVDKHKDEFKELLDVVSNFSKKYTLAEGNLEKIKELYAQNNGEDLKELASSFINLLTFTAIGAPATFKFFDKNIDRKRYTSTTEILNATLIHQSITGLYETRIDLSKLGGD

SEQ ID NO: 130 - protein, 1345 aa, Streptococcus mutans
MKKPYSIGLDIGTNSVGWAVVTDDYKVPAKKMKVLGNTDKSHIKKNLLGALLFDSGNTAEDRRLKRTARRRYTRRRNRILYLQEIFSEEMGKVDDSFFHRLEDSFLVTEDKRGERHPIFGNLEEEVKYHENFPTIYHLRQYLADNPEKVDLRLVYLALAHIIKFRGHFLIEGKFDTRNNDVQRLFQEFLAVYDNTFENSSLQEQNVQVEEILTDKISKSAKKDRVLKLFPNEKSNGRFAEFLKLIVGNQADFKKHFELEEKAPLQFSKDTYEEDLEELLGKIGDDYADLFTLAKNLYDAILLSGILTADDSSTKAPLSASMIQRYNEHQMDLAQLKQFIRQKLSDKYNEVFSDVSKDGYAGYIDGKTNQEAFYKYLKGLLNKIEGSGYFLDKIEREDFLRKQRTFDNGSIPHQIHLQEMRAIIRRQAEFYPFLADNQDRIEKILTFRIPYYVGPLARGKSDFAWLSRKSADKITPWNFDEIVDKESSAEAFINRMTNYDLYLPNQKVLPKHSLLYEKFTVYNELTKVKYKTEQGKTAFFDANMKQEIFDGVFKVYRKVTKDKLMDFLEKEFDEFRIVDLTGLDKENKVFNASYGTYHDLCKILDKDFLDNSKNEKILEDIVLTLTLFEDREMIRKRLENYSDLLTKEQVKKLERRHYTGWGRLSAELIHGIRNKESRKTILDYLIDDGNSNRNFMQLINDDALSFKEEIAKAQVIGETDNLNQVVSDIAGSPAIKKGILQSLKIVDELVKIMGHQPENIVVEMARENQFTNQGRRNSQQRLKGLTDSIKEFGSQILKEHPVENSQLQNDRLFLYYLQNGRDMYTGEELDIDYLSQYDIDHIIPQAFIKDNSIDNRVLTSSKENRGKSDDVPSKDVVRKMKPYWSKLLSAKLITQRKFDNLTKAERGGLTDDDKAGFIKRQLVETRQITKHVARILDERFNTETDENNKKIRQVKIVTLKSNLVSNFRKEFELYKVREINDYHHAHDAYLNAVIGKALLGVYPQLEPEFVYGDYPHFHGHEENKATAKKFFYSNIMNFFKKDDVRTDKNGEIIWKKDEHISNIKKVLSYPQVNIVKKVEEQTGGFSKESILPKGNSDKLIPRKTKKFYWDTKKYGGFDSPIVAYSILVIADIEKGKSKKLKTVKALVGVTIMEKMTFERDPVAFLERKGYRNVQEENIIKLPKYSLFKLENGRKRLLASARELQKGNEIVLPNHLGTLLYHAKNIHKVDEPKHLDYVDKHKDEFKELLDVVSNFSKKYTLAEGNLEKIKELYAQNNGEDLKELASSFINLLTFTAIGAPATFKFFDKNIDRKRYTSTTEILNATLIHQSITGLYETRIDLSKLGGD

SEQ ID NO: 131 - protein, 1345 aa, Streptococcus mutans
MKKPYSIGLDIGTNSVGWAVVTDDYKVPAKKMKVLGNTDKSHIKKNLLGALLFDSGNTAEDRRLKRTARRRYTRRRNRILYLQEIFSEEMGKVDDSFFHRLEDSFLVTEDKRGERHPIFGNLEEEVKYHENFPTIYHLRQYLADNPEKVDLRLVYLALAHIIKFRGHFLIEGKFDTRNNDVQRLFQEFLAVYDNTFENSSLQEQNVQVEEILTDKISKSAKKDRVLKLFPNEKSNGRFAEFLKLIVGNQADFKKHFELEEKAPLQFSKDTYEEELEVLLAQIGDNYAELFLSAKKLYDSILLSGILTVTDVSTKAPLSASMIQRYNEHQMDLAQLKQFIRQKLSDKYNEVFSDVSKDGYAGYIDGKTNQEAFYKYLKGLLNKIEGSGYFLDKIEREDFLRKQRTFDNGSIPHQIHLQEMRAIIRRQAEFYPFLADNQDRIEKILTFRIPYYVGPLARGKSDFAWLSRKSADKITPWNFDEIVDKESSAEAFINRMTNYDLYLPNQKVLPKHSLLYEKFTVYNELTKVKYKTEQGKTAFFDANMKQEIFDGVFKVYRKVTKDKLMDFLEKEFDEFRIVDLTGLDKENKVFNASYGTYHDLCKILDKDFLDNSKNEKILEDIVLTLTLFEDREMIRKRLENYSDLLTKEQVKKLERRHYTGWGRLSAELIHGIRNKESRKTILDYLIDDGNSNRNFMQLINDDALSFKEEIAKAQVIGETDNLNQVVSDIAGSPAIKKGILQSLKIVDELVKIMGHQPENIVVEMARENQFTKQGRRNSQQRLKGLTDSIKEFGSQILKEHPVENSQLQNDRLFLYYLQNGRDMYTGEELDIDYLSQYDIDHIIPQAFIKDNSIDNRVLTSSKENRGKSDDVPSKDVVRKMKSYWSKLLSAKLITQRKFDNLTKAERGGLTDDDKAGFIKRQLVETRQITKHVARILDERFYTETDENNKKIRQVKIVTLKSNLVSNFRKEFELYKVREINDYHHAHDAYLNAVIGKALLGVYPQLEPEFVYGDYPHFHGHKENKATAKKFFYSNIMNFFKKDDVRTDKNGEIIWKKDEHISNIKKVLSYPQVNIVKKVEEQTGGFSKESILPKGNSDKLIPRKTKKFYWDTKKYGGFDSPIVAYSILVIADIEKGKSKKLKTVKALVGVTIMEKMTFERDPVAFLERKGYRNVQEENIIKLPKYSLFKLENGRKRLLASARELQKGNEIVLPNHLGTLLYHAKNIHKVDEPKHLDYVDKHKDEFKELLDVVSNFSKKYTLAEGNLEKIKELYAQNNGEDLKELASSFINLLTFTAIGAPATFKFFDKNIDRKRYTSTTEILNATLIHQSITGLYETRIDLSKLGGD

SEQ ID NO: 132 - protein, 1345 aa, Streptococcus mutans
MKKPYSIGLDIGTNSVGWAVVTDDYKVPAKKMKVLGNTDKSHIKKNLLGALLFDSGNTAADRRLKRTARRRYTRRRNRILYLQEIFAEEMSKVDDSFFHRLEDSFLVTEDKRGERHPIFGNLEEEVKYHENFPTIYHLRQYLADNPEKVDLRLVYLALAHIIKFRGHFLIEGKFDTRNNDVQRLFQEFLAVYDNTFENSSLQEQNVQVEEILTDKISKSAKKDRVLKLFPNEKSNGRFAEFLKLIVGNQADFKKHFELEEKAPLQFSKDTYEEELEVLLTQIGDNYAELFLSAKKLYDSILLSGILTVTDVSTKAPLSASMIQRYNEHQMDLAQLKQFIRQKLSDKYNEVFSDVSKDGYAGYIDGKTNQEAFYKYLKGLLNKIEGSGYFLDKIEREDFLRKQRTFDNGSIPHQIHLQEMRAIIRRQAEFYPFLADNQDRIEKILTFRIPYYVGPLARGKSDFAWLSRKSADKITPWNFDEIVDKESSAEAFINRMTNYDLYLPNQKVLPKHSLLYEKFTVYNELTKVKYKTEQGKTAFFDANMKQEIFDGVFKVYRKVTKDKLMDFLEKEFDEFRIVDLTGLDKENKAFNASYGTYHDLRKILDKDFLDNSKNEKILEDIVLTLTLFEDREMIRKRLENYSDLLTKEQVKKLERRHYTGWGRLSAELIHGIRNKESRKTLLDYLIDDGNSNRNFMQLINDDALSFKEEIAKAQVIGETDNLNQVVSDIAGSPAIKKGILQSLKIVDELVKIMGHQPENIVVEMARENQFTNQGRRNSQQRLKGLTDSIKEFGSQILKEHPVENSQLQNDRLFLYYLQNGRDMYTGEELDIDYLSQYDIDHIIPQAFIKDNSIDNRVLTSSKENRGKSDDVPSKDVVRKMKPYWSKLLSAKLITQRKFDNLTKAERGGLTDDDKAGFIKRQLVETRQITKHVARILDERFNTETDENNKKIRQVKIVTLKSNLVSNFRKEFELYKVREINDYHHAHDAYLNAVIGKALLGVYPQLEPEFVYGDYPHFHGHEENKATAKKFFYSNIMNFFKKDDVRTDKNGEIIWKKDEHISNIKKVLSYPQVNIVKKVEEQTGGFSKESILPKGNSDKLIPRKTKKFYWDTKKYGGFDSPIVAYSILVIADIEKGKSKKLKTVKALVGVTIMEKMTFERDPVAFLERKGYRNVQEENIIKLPKYSLFKLENGRKRLLASARELQKGNEIVLPNHLGTLLYHAKNIHKVDEPKHLDYVDKHKDEFKELLDVVSNFSKKYTLAEGNLEKIKELYAQNNGEDLKELSSSFINLLTFTAIGAPAAFKFFDKNIDRKRYTSTTEILNATLIHQSITGLYETRIDLSKLGGD

SEQ ID NO: 133 - protein, 1345 aa, Streptococcus mutans
MKKPYSIGLDIGTNSVGWAVVTDDYKVPAKKMKVLGNTDKSHIKKNLLGALLFDSGNTAEDRRLKRTARRRYTRRRNRILYLQEIFSEEMGKVDDSFFHRLEDSFLVTEDKRGERHPIFGNLEEEVKYHENFPTIYHLRQYLADNPEKVDLRLVYLALAHIIKFRGHFLIEGKFDTRNNDVQRLFQEFLAVYDNTFENSSLQEQNVQVEEILTDKISKSAKKDRVLKLFPNEKSNGRFAEFLKLIVGNQADFKKHFELEEKAPLQFSKDTYEEELEVLLAQIGDNYAELFLSAKKLYDSILLSGILTVTDVSTKAPLSASMIQRYNEHQMDLAQLKQFIRQKLSDKYNEVFSDVSKDGYAGYIDGKTNQEAFYKYLKGLLNKIEGSGYFLDKIEREDFLRKQRTFDNGSIPHQIHLQEMRAIIRRQAEFYPFLADNQDRIEKILTFRIPYYVGPLARGKSDFAWLSRKSADKITPWNFDEIVDKESSAEAFINRMTNYDLYLPNQKVLPKHSLLYEKFTVYNELTKVKYKTEQGKTAFFDANMKQEIFDGVFKVYRKVTKDKLMDFLEKEFDEFRIVDLTGLDKENKVFNASYGTYHDLCKILDKDFLDNSKNEKILEDIVLTLTLFEDREMIRKRLENYSDLLTKEQVKKLERRHYTGWGRLSAELIHGIRNKESRKTILDYLIDDGNSNRNFMQLINDDALSFKEEIAKAQVIGETDNLNQVVSDIAGSPAIKKGILQSLKIVDELVKIMGHQPENIVVEMARENQFTKQGRRNSQQRLKGLTDSIKEFGSQILKEHPVENSQLQNDRLFLYYLQNGRDMYTGEELDIDYLSQYDIDHIIPQAFIKDNSIDNRVLTSSKENRGKSDDVPSKDVVRKMKSYWSKLLSAKLITQRKFDNLTKAERGGLTDDDKAGFIKRQLVETRQITKHVARILDERFYTETDENNKKIRQVKIVTLKSNLVSNFRKEFELYKVREINDYHHAHDAYLNAVIGKALLGVYPQLEPEFVYGDYPHFHGHKENKATAKKFFYSNIMNFFKKDDVRTDRNGEIIWKKDEHISNIKKVLSYPQVNIVKKVEEQTGGFSKESILPKGNSDKLIPRKTKKFYWDTKKYGGFDSPIVAYSILVIADIEKGKSKKLKTVKALVGVTIMEKMTFERDPVAFLERKGYRNVQEENIIKLPKYSLFKLENGRKRLLASARELQKGNEIVLPNHLGTLLYHAKNIHKVDEPKHLDYVDKHKDEFKELLDVVSNFSKKYTLAEGNLEKIKELYAQNNGEDLKELASSFINLLTFTAIGAPATFKFFDKNIDRKRYTSTTEILNATLIHQSITGLYETRIDLSKLGGD

SEQ ID NO: 134 - protein, 1336 aa, Streptococcus mutans
MKKSYSIGLDIGTNSVGWAVVTDDYKVPAKKMKVLGNTDKSHIKKNLLGALLFDSGNTAEDRRLKRTARRRYTRRRNRILYLQEIFSEEMGKVDDSFFHRLDESFLTDDDKNFDSHPIFGNKAEEDAYHQKFPTIYHLRKHLADSTEKADLRLVYLALAHMIKFRGHFLIEGELNAENTDVQKLFADFVGVYDRTFDDSHLSEITVDASSILTEKISKSRRLEKLINNYPKEKKNTLFGNLIALSLGLQPNFKTNFKLSEDAKLQFSKDTYEEDLEELLGKIGDDYADLFTLAKNLYDAILLSGILTADDSSTKAPLSASMIKRYAEHHEDLEKLKEFIKANKPELYHDIFKDETKNGYAGYIENGVKQDEFYKYLKNTLSKIAGSDYFLDKIEREDFLRKQRTFDNGSIPHQIHLQEMHAILRRQGDYYPFLKENQDRIEKILTFRIPYYVGPLARKNSRFAWAEYHSDEAVMPWNFDQVIDKESSAQAFIEHMTNNDLYLPNEKVLPKHSPLYEKYTVYNELTKIKYVTEIGEAKFFDANLKQEIFDGLFKHERKVTKKKLRTFLDKNFDEFRIVDIQGLDKETETFNASYATYQDLLKVIKDKVFMDNPENAEILENIVLTLTLFEDREMIKQRLAKYADVFDKKVIDQLARRHYTGWGRLSAKLLNGIRDKQSCKTIMDYLIDDAQSNRNLMQLITDDNLTFKDDIVKAQYVDNSDDLHQVVQSLAGSPAIKKGILQSLKIVDELVKVMGKEPEQIVVEMARENQTTAKGRRNSQQRYKRLKEAIKDLNHKILKEHPTDNQALQNNRLFLYYLQNGRDMYTGESLDINRLSDYDIDHVIPQAFIKDNSIDNRVLTSSKANRGKSDDVPSEDVVNRMRPFWNKLLSSGLISQRKYNNLTKKELTPDDKAGFIKRQLVETRQITKHVARMLDERFNKEFDDNNKRIRRVKIVTLKSNLVSSFRKEFELYKVREINDYHHAHDAYLNAVVVKALLVKYPKLEPEFVYGEYPKYNSYRERKATQKMFFYSNIMNMFKSKVKLADDQIVERPMIEVNDETGEIAWDKTKHITTVKKVLSYPQVNIVKKVEEQTGGLFDPKSPLEKLVPLKKALNPEKYGGYQKPTTAYPILLIVDTKQLIPISVMDKKRFEQNPVKFLKDKGYQQIEKNNFVKLPKYTLVDIGNGIKRLWASSKEVHKGNQLVVSKKSQDLLYHAHHLDNDYSNEYVKNHYQQFDILFNEITSFSKKCKLGKEHIQKIEEAYSKERDSASIEELADGFIKLLGFTQLGATSPFSFLGIKLNQKQYTGKKDYLEATLIHQSITGLYETRIDLNKLGGD

SEQ ID NO: 135 - protein, 1345 aa, Streptococcus mutans
MKKPYSIGLDIGTNSVGWAVVTDDYKVPAKKMKVLGNTDKSHIKKNLLGALLFDSGNTAADRRLKRTARRRYTRRRNRILYLQEIFAEEMSKVDDSFFHRLEDSFLVTEDKRGERHPIFGNLEEEVKYHENFPTIYHLRQYLADNPEKVDLRLVYLALAHIIKFRGHFLIEGKFDTRNNDVQRLFQEFLAVYDNTFENSSLQEQNVQVEEILTDKISKSAKKDRVLKLFPNEKSNGRFAEFLKLIVGNQADFKKHFELEEKAPLQFSKDTYEEELEVLLAQIGDNYAELFLSAKKLYDSILLSGILTVTDVSTKAPLSASMIQRYNEHQMDLAQLKQFIRQKLSDKYNEVFSDVSKDGYAGYIDGKTNQEAFYKYLKGLLNKIEGSGYFLDKIEREDFLRKQRTFDNGSIPHQIHLQEMRAIIRRQAEFYPFLADNQDRIEKILTFRIPYYVGPLARGKSDFAWLSRKSADKITPWNFDEIVDKESSAEAFINRMTNYDLYLPNQKVLPKHSLLYEKFTVYNELTKVKYKTEQGKTAFFDANMKQEIFDGVFKVYRKVTKDKLMDFLEKEFDEFRIVDLTGLDKENKAFNASYGTYHDLRKILDKDFLDNSKNEKILEDIVLTLTLFEDREMIRKRLENYSDLLTKEQVKKLERRHYTGWGRLSAELIHGIRNKESRKTILDYLIDDGNSNRNFMQLINDDALSFKEEIAKAQVIGETDNLNQVVSDIAGSPAIKKGILQSLKIVDELVKIMGHQPENIVVEMARENQFTNQGRRNSQQRLKGLTDSIKEFGSQILKEHPVEHSQLQNDRLFLYYLQNGRDMYTGEELDIDYLSQYDIDHIIPQAFIKDNSIDNRVLTSSKENRGKSDDVPSKNVVRKMKSYWSKLLSAKLITQRKFDNLTKAERGGLTDDDKAGFIKRQLVETRQITKHVARILDERFHTETDENNKKIRQVKIVTLKSNLVSNFRKEFELYKVREINDYHHAHDAYLNAVIGKALLGVYPQLEPEFVYGDYPHFHGHKENKATAKKFFYSNIMNFFKKDDVRTDKNGEIIWKKDEHISNIKKVLSYPQVNIVKKVEEQTGGFSKESILPKGNSDKLIPRKTKKFYWDTKKYGGFDSPIVAYSILVIADIEKGKSKKLKTVKALVGVTIMEKMTFERDPVAFLERKGYRNVQEENIIKLPKYSLFKLENGRKRLLASARELQKGNEIVLPNHLGTLLYHAKNIHKVDEPKHLDYVDKHKDEFKELLDVVSNFSKKYTLAEGNLEKIKELYAQNNGEDLKELASSFINLLTFTAIGAPATFKFFDKNIDRKRYTSTTEILNATLIHQSITGLYETRIDLSKLGGD

SEQ ID NO: 136 - protein, 1345 aa, Streptococcus mutans
MKKPYSIGLDIGTNSVGWAVVTDDYKVPAKKMKVLGNTDKSHIEKNLLGALLFDSGNTAEDRRLKRTARRRYTRRRNRILYLQEIFSEEMGKVDDSFFHRLEDFFLVTEDKRGERHPIFGNLEEEVKYHENFPTIYHLRQYLADNPEKVDLRLVYLALAHIIKFRGHFLIEGKFDTRNNDVQRLFQEFLAVYDNTFENSSLQEQNVQVEEILTDKISKSAKKDRVLKLFPNEKSNGRFAEFLKLIVGNQADFKKHFELEEKAPLQFSKDTYEEELEVLLAQIGDNYAELFLSAKKLYDSILLSGILTADDSSTKAPLSASMIQRYNEHQMDLAQLKQFIRQKLSDKYNEVFSDVSKDGYAGYIDGKTNQEAFYKYLKGLLNKIEGSGYFLDKIEREDFLRKQRTFDNGSIPHQIHLQEMRAIIRRQSEFYPFLADNQDRIEKILTFRIPYYVGPLARGKSDFAWLSRKSADKITPWNFDEIVDKESSAEAFINRMTNYDLYLPNQKVLPKHSLLYEKFTVYNELTKVKYKTEQGETAFFDANMKQEIFDGVFKVYRKVTKDKLMDFLEKEFDEFRIVDLTGLDKENKAFNASYGTYHDLRKILDKDFLDNSKNEKILEDIVLTLTLFEDREMIRKRLKNYSDLLTKEQLKKLERRHYTGWGRLSAELIHGIRNKESRKTILDYLIDDGNSNRNFMQLINDDALSFKEEIAKAQVIGETDNLNQVVSDIAGSPAIKKGILQSLKIVDELVKIMGHQPENIVVEMARENQFTNQGRRNSQQRLKGLTDSIKEFGSQILKEHPVENSQLQNDRLFLYYLQNGRDMYTGEELDIDYLSQYDIDHIIPQAFIKDNSIDNRVLTSSKENRGKSDDVPSKDVVRKMKPYWSKLLSAKLITQRKFDNLTKAERGGLTDDDKAGFIKRQLVETRQITKHVARILDERFNTETDENNKKIRQVKIVTLKSNLVSNFRKEFELYKVREINDYHHAHDAYLNAVIGKALLGVYPQLEPEFVYGDYPHFHGHEENKATAKKFFYSNIMNFFKKDDVRTDKNGEIIWKKDEHISNIKKVLSYPQVNIVKKVEEQTGGFSKESILPKGNSDKLIPRKTKKFYWDTKKYGGFDSPIVAYSILVIADIEKGKSKKLKTVKALVGVTIMEKMTFERDPVAFLERKGYRNVQEENIIKLPKYSLFKLENGRKRLLASARELQKGNEIVLPNHLGTLLYHAKNIHKVDEPKHLDYVDKHKDEFKELLDVVSNFSKKYTLAEGNLEKIKELYAQNNGEDLKELASSFINLLTFTAIGAPATFKFFDKNIDRKRYTSTTEILNATLIHQSITGLYETRIDLSKLGGD

SEQ ID NO: 137 - protein, 1345 aa, Streptococcus mutans
MKKPYSIGLDIGTNSVGWAVVTDDYKVPAKKMKVLGNTDKSHIKKNLLGALLFDSGNTAEDRRLKRTARRRYTRRRNRILYLQEIFSEEMGKVDDSFFHRLDESFLTDDDKNFDSHPIFGNKAEEDAYHQKFPTIYHLRKHLADSTEKADLRLVYLALAHMIKFRGHFLIEGELNAENTDVQKLFADFVGVYDRTFDDSHLSEITVDASSILTEKISKSRRLEKLINNYPKEKKNTLFGNLIALSLGLQPNFKTNFKLSEDAKLQFSKDTYEEELEVLLAQIGDNYAELFLSAKKLYDSILLSGILTVTDVSTKAPLSASMIQRYNEHQMDLAQLKQFIRQKLSDKYNEVFSDVSKDGYAGYIDGKTNQEAFYKYLKGLLNKIEGSGYFLDKIEREDFLRKQRTFDNGSIPHQIHLQEMRAIIRRQAEFYPFLADNQDRIEKILTFRIPYYVGPLARGKSDFAWLSRKSADKITPWNFDEIVDKESSVEAFINRMTNYDLYLPNQKVLPKHSLLYEKFTVYNELTKVKYKTEQGKTAFFDANMKQEIFDGVFKVYRKVTKDKLMDFLEKEFDEFRIVDLTGLDKENKAFNASYGTYHDLRKILDKDFLDNSKNEKILEDIVLTLTLFEDREMIRKRLKNYSDLLTKEQLKKLERRHYTGWGRLSAELIHGIRNKESRKTILDYLIDDGNSNRNFMQLINDDALSFKEEIAKAQVIGETDNLNQVVSDIAGSPAIKKGILQSLKIVDELVKIMGHQPENIVVEMARENQFTNQGRRNSQQRLKGLTDSIKEFGSQILKEHPVENSQLQNDRLFLYYLQNGRDMYTGEELDIDYLSQYDIDHIIPQAFIKDNSIDNRVLTSSKENRGKSDDVPSKDVVRKMKSYWSKLLSAKLITQRKFDNLTKGERGGLTDDDKAGFIKRQLVETRQITKHVARILDERFNTETDENNKKIRQVKIVTLKSNLVSNFRKEFELYKVREINDYHHAHDAYLNAVIGKALLGVYPQLEPEFVYGDYPHFHGHKENKATAKKFFYSNIMNFFKKDDVRTDKNGEIIWKKDEYISNIKKVLSYPQVNIVKKVEEQTGGFSKESILPKGDSDKLIPRKTKKFYWDTKKYGGFDSPIVAYSILVIADIEKGKSKKLKTVKALVGVTIMEKMTFERDPVAFLERKGYRNVQEENIIKLPKYSLFKLENGRKRLLASARELQKGNEIVLPNHLGTLLYHAKNIHKVDEPKHLDYVDKHKDEFKELLDVVSNFSKKYTLAEGNLEKIKELYAQNNGEDLKELASSFINLLTFTAIGAPATFKFFDKNIDRKRYTSTTEILNATLIHQSITGLYETRIDLSKLGGD

SEQ ID NO: 138 - protein, 1345 aa, Streptococcus mutans
MKKPYSIGLDIGTNSVGWAVVTDDYKVPAKKMKVLGNTDKSHIKKNLLGALLFDSGNTAADRRLKRTARRRYTRRRNRILYLQEIFAEEMSKVDDSFFHRLEDSFLVTEDKRGERHPIFGNLEEEVKYHENFPTIYHLRQYLADNPEKVDLRLVYLALAHIIKFRGHFLIEGKFDTRNNDVQRLFQEFLAVYDNTFENSSLQEQNVQVEEILTDKISKSAKKDRVLKLFPNEKSNGRFAEFLKLIVGNQADFKKHFELEEKAPLQFSKDTYEEELEVLLAQIGDNYAELFLSAKKLYDSILLSGILTVTDVSTKAPLSASMIQRYNEHQMDLAQLKQFIRQKLSDKYNEVFSDVSKDGYAGYIDGKTNQEAFYKYLKGLLNKIEGSGYFLDKIEREDFLRKQRTFDNGSIPHQIHLQEMRAIIRRQAEFYPFLADNQDRIEKILTFRIPYYVGPLARGKSDFAWLSRKSADKITPWNFDEIVDKESSAEAFINRMTNYDLYLPNQKVLPKHSLLYEKFTVYNELTKVKYKTEQGKTAFFDANMKQEIFDGVFKVYRKVTKDKLMDFLEKEFDEFRIVDLTGLDKENKVFNASYGTYHDLCKILDKDFLDNSKNEKILEDIVLTLTLFEDREMIRKRLENYSDLLTKEQVKKLERRHYTGWGRLSAELIHGIRNKESRKTILDYLIDDGNSNRNFMQLINDDALSFKEEIAKAQVIGETDNLNQVVSDIAGSPAIKKGILQSLKIVDELVKIMGHQPENIVVEMARENQFTKQGRRNSQQRLKGLTDSIKEFGSQILKEHPVENSQLQNDRLFLYYLQNGRDMYTGEELDIDYLSQYDIDHIIPQAFIKDNSIDNRVLTSSKENRGKSDDVPSKDVVRKMKSYWSKLLSAKLITQRKFDNLTKAERGGLTDDDKAGFIKRQLVETRQITKHVARILDERFYTETDENNKKIRQVKIVTLKSNLVSNFRKEFELYKVREINDYHHAHDAYLNAVIGKALLGVYPQLEPEFVYGDYPHFHGHKENKATAKKFFYSNIMNFFKKDDVRTDKNGEIIWKKDEHISNIKKVLSYPQVNIVKKVEEQTGGFSKESILPKGNSDKLIPRKTKKFYWDTKKYGGFDSPIVAYSILVIADIEKGKSKKLKTVKALVGVTIMEKMTFERDPVAFLERKGYRNVQEENIIKLPKYSLFKLENGRKRLLASARELQKGNEIVLPNHLGTLLYHAKNIHKVDEPKHLDYVDKHKDEFKELLDVVSNFSKKYTLAEGNLEKIKELYAQNNGEDLKELASSFINLLTFTAIGAPATFKFFDKNIDRKRYTSTTEILNATLIHQSITGLYETRIDLSKLGGD

SEQ ID NO: 139 - protein, 1345 aa, Streptococcus mutans
MKKPYSIGLDIGTNSVGWAVVTDDYKVPAKKMKVLGNTDKSHIKKNLLGALLFDSGNTAADRRLKRTARRRYTRRRNRILYLQEIFAEEMSKVDDSFFHRLEDSFLVTEDKRGERHPIFGNLEEEVKYHENFPTIYHLRQYLADNPEKVDLRLVYLALAHIIKFRGHFLIEGKFDTRNNDVQRLFQEFLAVYDNTFENSSLQEQNVQVEEILTDKISKSAKKDRVLKLFPNEKSNGRFAEFLKLIVGNQADFKKHFELEEKAPLQFSKDTYEEELEVLLAQIGDNYAELFLSAKKLYDSILLSGILTVTDVSTKAPLSASMIQRYNEHQMDLAQLKQFIRQKLSDKYNEVFSDVSKDGYAGYIDGKTNQEAFYKYLKGLLNKIEGSGYFLDKIEREDFLRKQRTFDNGSIPHQIHLQEMRAIIRRQAEFYPFLADNQDRIEKILTFRIPYYVGPLARGKSDFAWLSRKSADKITPWNFDEIVDKESSAEAFINRMTNYDLYLPNQKVLPKHSLLYEKFTVYNELTKVKYKTEQGKTAFFDANMKQEIFDGVFKVYRKVTKDKLMDFLEKEFDEFRIVDLTGLDKENKAFNASYGTYHDLRKILDKDFLDNSKNEKILEDIVLTLTLFEDREMIRKRLENYSDLLTKEQVKKLERRHYTGWGRLSAELIHGIRNKESRKTILDYLIDDGNSNRNFMQLINDDALSFKEEIAKAQVIGETDNLNQVVSDIAGSPAIKKGILQSLKIVDELVKIMGHQPENIVVEMARENQFTNQGRRNSQQRLKGLTDSIKEFGSQILKEHPVENSQLQNDRLFLYYLQNGRDMYTGEELDIDYLSQYDIDHIIPQAFIKDNSIDNRVLTSSKENRGKSDDVPSKNVVRKMKSYWSKLLSAKLITQRKFDNLTKAERGGLTDDDKAGFIKRQLVETRQITKHVARILDERFHTETDENNKKIRQVKIVTLKSNLVSNFRKEFELYKVREINDYHHAHDAYLNAVIGKALLGVYPQLEPEFVYGDYPHFHGHKENKATAKKFFYSNIMNFFKKDDVRTDKNGEIIWKKDEHISNIKKVLSYPQVNIVKKVEEQTGGFSKESILPKGNSDKLIPRKTKKFYWDTKKYGGFDSPIVAYSILVIADIEKGKSKKLKTVKALVGVTIMEKMTFERDPVAFLERKGYRNVQEENIIKLPKYSLFKLENGRKRLLASARELQKGNEIVLPNHLGTLLYHAKNIHKVDEPKHLDYVDKHKDEFKELLDVVSNFSKKYTLAEGNLEKIKELYAQNNGEDLKELSSSFINLLTFTAIGAPAAFKFFDKNIDRKRYTSTTEILNATLIHQSITGLYETRIDLSKLGGD

SEQ ID NO: 140 - protein, 1336 aa, Streptococcus mutans
MKKPYSIGLDIGTNSVGWAVVTDDYKVPAKKMKVLGNTDKSHIKKNLLGALLFDSGNTAEDRRLKRTARRRYTRRRNRILYLQEIFAEEMSKVDDSFFHRLDESFLTDDDKNFDSHPIFGNKAEEDAYHQKFPTIYHLRKHLADSTEKADLRLVYLALAHMIKFRGHFLIEGELNAENTDVQKLFADFVGVYDRTFDDSHLSEITVDASSILTEKISKSRRLEKLINNYPKEKKNTLFGNLIALSLGLQPNFKTNFKLSEDAKLQFSKDTYEEDLEELLGKIGDDYADLFTLAKNLYDAILLSGILTADDSSTKAPLSASMIKRYAEHHEDLEKLKEFIKANKPELYHDIFKDETKNGYAGYIENGVKQDEFYKYLKNTLSKITGSDYFLDQIEREDFLRKQRTFDNGSIPHQIHLQEMHAILRRQGDYYPFLKENQDRIEKILTFRIPYYVGPLARKNSRFAWAEYHSDEAVTPWNFDQVIDKESSAQAFIEHMTNNDLYLPNEKVLPKHSPLYEKYTVYNELTKIKYVTEIGEAKFFDANLKQEIFDGLFKHERKVTKKKLRTFLDKNFDEFRIVDIQGLDKETETFNASYATYQDLLKVIKDKVFMDNPENAEILENIVLTLTLFEDREMIKQRLAKYADVFDKKVIDQLARRHYTGWGRLSAKLLNGIRDKQSCKTIMDYLIDDAQSNRNLMQLITDDNLTFKDDIVKAQYVDNSDDLHQVVQSLAGSPAIKKGILQSLKIVDELVKVMGKEPEQIVVEMARENQTTAKGRRNSQQRYKRLKEAIKDLNHKILKEHPTDNQALQNNRLFLYYLQNGRDMYTGESLDINRLSDYDIDHVIPQAFIKDNSIDNRVLTSSKANRGKSDDVPSEDVVNRMRPFWNKLLSSGLISQRKYNNLTKKELTLDDKAGFIKRQLVETRQITKHVARMLDERFNKEFDDNNKRIRRVKIVTLKSNLVSSFRKEFELYKVREINDYHHAHDAYLNAVVVKALLVKYPKLEPEFVYGEYPKYNSYRERKATQKMFFYSNIMNMFKSKVKLADDQIVERPMIEVNDETGEIAWDKTKHITTVKKVLSYPQVNIVKKVEEQTGGLFDPKSPLEKLVPLKKALNPEKYGGYQKPTTAYPILLIVDTKQLIPISVMDKKRFEQNPVKFLKDKGYQQIEKNNFVKLPKYTLVDIGNGIKRLWASSKEVHKGNQLVVSKKSQDLLYHAHHLDNDYSNEYVKNHYQQFDILFNEITSFSKKCKLGKEHIQKIEEAYSKERDFASIEELADGFIKLLGFTQLGATSPFSFLGIKLNQKQYTGKKDYLEATLIHQSITGLYETRIDLSKLGGD

SEQ ID NO: 141 - protein, 1345 aa, Streptococcus mutans
MKKPYSIGLDIGTNSVGWSVVTDDYKVPAKKMKVLGNTDKSHIEKNLLGALLFDSGNTAEDRRLKRTARRRYTRRRNRILYLQEIFSEEMGKVDDSFFHRLEDSFLVTEDKRGERHPIFGNLEEEVKYHENFPTIYHLRQYLADNPEKVDLRLVYLALAHIIKFRGHFLIEGKFDTRNNDVQRLFQEFLAVYDNTFENSSLQEQNVQVEEILTDKISKSAKKDRVLKLFPNEKSNGRFAEFLKLIVGNQADFKKHFELEEKAPLQFSKDTYEEELEVLLAQIGDNYAELFLSAKKLYDSILLSGILTVTDVGTKAPLSASMIQRYNEHQMDLAQLKQFIRQKLSDKYNEVFSDVSKDGYAGYIDGKTNQEAFYKYLKGLLNKIEGSGYFLDKIEREDFLRKQRTFDNGSIPHQIHLQEMRAIIRRQAEFYPFLADNQDRIEKLLTFRIPYYVGPLARGKSDFAWLSRKSADKITPWNFDEIVDKESSAEAFINRMTNYDLYLPNQKVLPKHSLLYEKFTVYNELTKVKYKTEQGKTAFFDANMKQEIFDGVFKVYRKVTKDKLMDFLEKEFDEFRIVDLTGLDKENKVFNASYGTYHDLCKILDKDFLDNSKNEKILEDIVLTLTLFEDREMIRKRLENYSDLLTKEQVKKLERRHYTGWGRLSAELIHGIRNKESRKTILDYLIDDGNSNRNFMQLINDDALSFKEEIAKAQVIGETDNLNQVVSDIAGSPAIKKGILQSLKIVDELVKIMGHQPENIVVEMARENQFTNQGRRNSQQRLKGLTDSIKEFGSQILKEHPVENSQLQNDRLFLYYLQNGRDMYTGEELDIDYLSQYDIDHIIPQAFIKDNSIDNRVLTSSKENRGKSDDVPSKDVVRKMKSYWSKLLSAKLITQRKFDNLTKAERGGLTDDDKAGFIKRQLVETRQITKHVARILDERFNTETDENNKKIRQVKIVTLKSNLVSNFRKEFELYKVREINDYHHAHDAYLNAVIGKALLGVYPQLEPEFVYGDYPHFHGHKENKATAKKFFYSNIMNFFKKDDVRIDKNGEIIWKKDEHISNIKKVLSYPQVNIVKKVEEQTGGFSKESILPKGNSDKLIPRKTKKFYWDTKKYGGFDSPIVAYSILVIADIEKGKSKKLKTVKALVGVTIMEKMTFERDPVAFLERKGYRNVQEENIIKLPKYSLFKLENGRKRLLASARELQKGNEIVLPNHLGTLLYHAKNIHKVDEPKHLDYVDKHKDEFKELLDVVSNFSKKYTLAEGNLEKIKELYAQNNGEDLKELASSFINLLTFTAIGAPATFKFFDKNIDRKRYTSTTEILNATLIHQSITGLYETRIDLSKLGGD

SEQ ID NO: 142 - protein, 1345 aa, Streptococcus mutans
MKKPYSIGLDIGTNSVGWAVVTDDYKVPAKKMKVLGNTDKSHIKKNLLGALLFDSGNTAEDRRLKRTARRRYTRRRNRILYLQEIFSEEMGKVDDSFFHRLEDSFLVTEDKRGERHPIFGNLEEEVKYHENFPTIYHLRQYLADNPEKTDLRLVYLALAHIIKFRGHFLIEGKFDTRNNDVQRLFQEFLAVYDNTFENSSLQEQNVQVEEILTDKISKSAKKDRVLKLFPNEKSNGRFAEFLKLIVGNQADFKKHFELEEKAPLQFSKDIYEEELEVLLAQIGDNYAELFLSAKKLYDSILLSGILTVTDVSTKAPLSASMIQRYNEHQMDLAQLKQFIRQKLSDKYNEVFSDVSKDGYAGYIDGKTNQEAFYKYLKGLLNKIEGSGYFLDKIEREDFLRKQRTFDNGSIPHQIHLQEMRAIIRRQAEFYPFLADNQDRIEKILTFRIPYYVGPLARGKSDFAWLSRKSADKITPWNFDEIVDKESSVEAFINRMTNYDLYLPNQKVLPKHSLLYEKFTVYNELTKVKYKTEQGKTAFFDANMKQEIFDGVFKVYRKVTKDKLMDFLEKEFDEFRIVDLTGLDKENKAFNASYGTYHDLRKILDKDFLDNSKNEKILEDIVLTLTLFEDREMIRKRLKNYSDLLTKEQLKKLERRHYTGWGRLSAELIHGIRNKESRKTILDYLIDDGNSNRNFMQLINDDALSFKEEIAKAQVIGETDNLNQVVSDIAGSPAIKKGILQSLKIVDELVKIMGHQPENIVVEMARENQFTNQGRRNSQQRLKGLTDSIKEFGSQILKEHPVENSQLQNDRLFLYYLQNGRDMYTGEELDIDYLSQYDIDHIIPQAFIKDNSIDNRVLTSSKENRGKSDDVPSKNVVRKMKSYWSKLLSAKLITQRKFDNLTKAERGGLTDDDKAGFIKRQLVETRQITKHVARILDERFHTETDENNKKIRQVKIVTLKSNLVSNFRKEFELYKVREINDYHHAHDAYLNAVIGKALLGVYPQLEPEFVYGDYPHFHGHKENKATAKKFFYSNIMNFFKKDDVRTDKNGEIIWKKDEHISNIKKVLSYPQVNIVKKVEEQTGGFSKESILPKGNSDKLIPRKTKKFYWDTKKYGGFDSPIVAYSILVIADIEKGKSKKLKTVKALVGVTIMEKMTFERDPVAFLERKGYRNVQEENIIKLPKYSLFKLENGRKRLLASARELQKGNEIVLPNHLGTLLYHAKNIHKVDEPKHLDYVDKHKDEFKELLDVVSNFSKKYTLAEGNLEKIKELYAQNNGEDLKELASSFINLLTFTAIGAPATFKFFDKNIDRKRYTSTTEILNATLIHQSITGLYETRIDLSKLGGD

SEQ ID NO: 143 - protein, 1345 aa, Streptococcus mutans
MKKPYSIGLDIGTNSVGWAVVTDDYKVSAKKMKVLGNTDKSHIKKNLLGALLFDSGNTAEDRRLKRTARRRYTRRRNRILYLQEIFAEEMSKVDDSFFHRLEDSFLVTEDKRGERHPIFGNLEEEVKYHENFPTIYHLRQYLADNPEKVDLRLVYLALAHIIKFRGHFLIEGKFDTRNNDVQRLFQEFLAVYDNTFENSSLQEQNVQVEEILTDKISKSAKKDRVLKLFPNEKSNGRFAEFLKLIVGNQADFKKHFELEEKAPLQFSKDTYEEELEVLLAQIGDNYAELFLSAKKLYDSILLSGILTVTDVSTKAPLSASMIQRYNEHQMDLAQLKQFIRQKLSDKYNEVFSDVSKDGYAGYIDGKTNQEAFYKYLKGLLNKIEGSGYFLDKIEREDFLRKQRTFDNGSIPHQIHLQEMRAIIRRQAEFYPFLADNQDRIEKILTFRIPYYVGPLARGKSDFAWLSRKSADKITPWNFDEIVDKESSAEAFINRMTNYDLYLPNQKVLPKHSLLYEKFTVYNELTKVKYKTEQGKTAFFDANMKQEIFDGVFKVYRKVTKDKLMDFLEKEFDEFRIVDLTGLDKENKAFNASYGTYHDLRKILDKDFLDNSKNEKILEDIVLTLTLFEDREMIRKRLENYSDLLTKEQVKKLERRHYTGWGRLSAELIHGIRNKESRKTILDYLIDDGNSNRNFMQLINDDALSFKEEIAKAQVIGETDNLNQVVSDIAGSPAIKKGILQSLKIVDELVKIMGHQPENIVVEMARENQFTNQGRRNSQQRLKGLTDSIKEFGSQILKEHPVEHSQLQNDRLFLYYLQNGRDMYTGEELDIDYLSQYDIDHIIPQAFIKDNSIDNRVLTSSKENRGKSDDVPSKNVVRKMKSYWSKLLSAKLITQRKFDNLTKAERGGLTDDDKAGFIKRQLVETRQITKHVARILDERFHTETDENNKKIRQVKIVTLKSNLVSNFRKEFELYKVREINDYHHTHDAYLNAVIGKALLGVYPQLEPEFVYGDYPHFHGHKENKATAKKFFYSNIMNFFKKDDVRTDKNGEIIWKKDEHISNIKKVLSYPQVNIVKKVEEQTGGFSKESILPKGNSDKLIPRKTKKFYWDTKKYGGFDSPIVAYSILVIADIEKGKSKKLKTVKALVGVTIMEKMTFERDPVAFLERKGYRNVQEENIIKLPKYSLFKLENGRKRLLASARELQKGNEIVLPNHLGTLLYHAKNIHKVDEPKHLDYVDKHKDEFKELLDVVSNFSKKYTLAEGNLEKIKELYAQNNGEDLKELASSFINLLTFTAIGAPATFKFFDKNIDRKRYTSTTEILNATLIHQSITGLYETRIDLSKLGGD

SEQ ID NO: 144 - protein, 1345 aa, Streptococcus mutans
MKKPYSIGLDIGTNSVGWAVVTDDYKVPAKKMKVLGNTDKSHIKKNLLGALLFDSGNTAEDRRLKRTARRRYTRRRNRILYLQEIFSEEMGKVDDSFFHRLEDSFLVTEDKRGERHPIFGNLEEEVKYHENFPTIYHLRQYLADNPEKTDLRLVYLALAHIIKFRGHFLIEGKFDTRNNDVQRLFQEFLAVYDNTFENSSLQEQNVQVEEILTDKISKSAKKDRVLKLFPNEKSNGRFAEFLKLIVGNQADFKKHFELEEKAPLQFSKDIYEEELEVLLAQIGDNYAELFLSAKKLYDSILLSGILTVTDVSTKAPLSASMIQRYNEHQMDLAQLKQFIRQKLSDKYNEVFSDVSKDGYAGYIDGKTNQEAFYKYLKGLLNKIEGSGYFLDKIEREDFLRKQRTFDNGSIPHQIHLQEMRAIIRRQAEFYPFLADNQDRIEKILTFRIPYYVGPLARGKSDFAWLSRKSADKITPWNFDEIVDKESSVEAFINRMTNYDLYLPNQKVLPKHSLLYEKFTVYNELTKVKYKTEQGKTAFFDANMKQEIFDGVFKVYRKVTKDKLMDFLEKEFDEFRIVDLTGLDKENKAFNASYGTYHDLRKILDKDFLDNSKNEKILEDIVLTLTLFEDREMIRKRLKNYSDLLTKEQLKKLERRHYTGWGRLSAELIHGIRNKESRKTILDYLIDDGNSNRNFMQLINDDALSFKEEIAKAQVIGETDNLNQVVSDIAGSPAIKKGILQSLKIVDELVKIMGHQPENIVVEMARENQFTNQGRRNSQQRLKGLTDSIKEFGSQILKEHPVENSQLQNDRLFLYYLQNGRDMYTGEELDIDYLSQYDIDHIIPQAFIKDNSIDNRVLTSSKENRGKSDDVPSKDVVRKMKSYWSKLLSAKLITQRKFDNLTKAERGGLTDDDKAGFIKRQLVETRQITKHVARILDERFNTETDENNKKIRQVKIVTLKSNLVSNFRKEFELYKVREINDYHHAHDAYLNAVIGKALLGVYPQLEPEFVYGDYPHFHGHKENKATAKKFFYSNIMNFFKKDDVRTDKNGEIIWKKDEHISNIKKVLSYPQVNIVKKVEEQTGGFSKESILPKGNSYKLIPRKTKKFYWDTKKYGGFDSPIVAYSILVIADIEKGKSKKLKTVKALVGVTIMEKMTFERDPVAFLERKGYRNVQEENIIKLPKYSLFKLENGRKRLLASARELQKGNEIVLPNHLGTLLYHAKNIHKVDEPKHLDYVDKHKDEFKELLDVVSNFSKKYTLAEGNLEKIKELYAQNNGEDLKELASSFINLLTFTAIGAPAAFKFFDKNIDRKRYTSTTEILNATLIHQSITGLYETRIDLSKLGGD

SEQ ID NO: 145 - protein, 1345 aa, Streptococcus mutans
MKKPYSIGLDIGTNSVGWAVVTDDYKVPAKKMKVLGNTDKSHIKKNLLGALLFDSGNTAEDRRLKRTTRRRYTRRRNRILYLQEIFSEEMGKVDDSFFHRLEDSFLVTEDKRGERHPIFGNLEEEVKYHENFPTIYHLRQYLADNPEKTDLRLVYLALAHIIKFRGHFLIEGKFDTRNNDVQRLFQEFLAVYDNTFENSSLQEQNVQVEEILTDKISKSAKKDRVLKLFPNEKSNGCFAEFLKLIVGNQADFKKHFELEEKAPLQFSKDTYEEELEVLLAQIGDNYAELFLSAKKLYDSILLSGILTVTDVSTKAPLSASMIQRYNEHQMDLTQLKQFIRQKLSDKYNEVFSDVSKDGYAGYIDGKTNQEAFYKYLKGLLNKIEGSGYFLDKIEREDFLRKQRTFDNGSIPHQIHLQEMRAIIRRQAEFYPFLADNQDRIEKLLTFRIPYYVGPLASGKSDFAWLSRKSADKITPWNFDEIVDKESSAEAFINRMTNYDLYLPNQKVLPKHSLLYEKFTVYNELTKVKYKTEQGKTAFFDANMKQEIFDGVFKVYRKVTKDKLMDFLEKEFDEFRIVDLTGLDKENKVFNASYGTYHDLCKILDKDFLDNSKNEKILEDIVLTLTLFEDREMIRKRLENYSDLLTKEQVKKLERRHYTGWGRLSAELIHGIRNKESRKTILDYLIDDGNSNRNFMQLINDDALSFKEEIAKAQVIGETDNLNQVVSDIAGSPAIKKGILQSLKIVDELVKIMGHQPENIVVEMARENQFTNQGRRNSQQRLKGLTDSIKEFGSQILKEHPVENSQLQNDRLFLYYLQNGRDMYTGEELDIDYLSQYDIDHIIPQAFIKDNSIDNRVLTSSKENRGKSDDVPSKDVVRKMKSYWSKLLSAKLITQRKFDNLTKAERGGLTDDDKAGFIKRQLVETRQITKHVARILDERFNTETDENNKKIRQVKIVTLKSNLVSNFRKEFELYKVREINDYHHAHDAYLNAVIGKALLGVYPQLEPEFVYGDYPHFHGHKENKATAKKFFYSNIMNFFKKDDVRTDKNGEIIWKKDEHISNIKKVLSYPQVNIVKKVEEQTGGFSKESILPKGNSDKLIPRKTKKFYWDTKKYGGFDSPIVAYSILVIADIEKGKSKKLKTVKALVGVTIMEKMTFERDPVAFLERKGYRNVQEENIIKLPKYSLFKLENGRKRLLASARELQKGNEIVLPNHLGTLLYHAKNIHKVDEPKHLDYVDKHKDEFKELLDVVSNFSKKYTLAEGNLEKIKELYAQNNGEDLKELASSFINLLTFTAIGAPATFKFFDKNIDRKRYTSTTEILNATLIHQSITGLYETRIDLSKLGGD

SEQ ID NO: 146 - protein, 1345 aa, Streptococcus mutans
MKKPYSIGLDIGTNSVGWAVVTDDYKVPAKKMKVLGNTDKSHIKKNLLGALLFDSGNTAEDRRLKRTARRRYTRRRNRILYLQEIFSEEMGKVDDSFFHRLEDSFLVTEDKRGERHPIFGNLEEEVKYHENFPTIYHLRQYLADNPEKTDLRLVYLALAHIIKFRGHFLIEGKFDTRNNDVQRLFQEFLAVYDNTFENSSLQEQNVQVEEILTDKISKSAKKDRVLKLFPNEKSNGRFAEFLKLIVGNQADFKKHFELEEKAPLQFSKDIYEEELEVLLAQIGDNYAELFLSAKKLYDSILLSGILTVTDVSTKAPLSASMIQRYNEHQMDLAQLKQFIRQKLSDKYNEVFSDVSKDGYAGYIDGKTNQEAFYKYLKGLLNKIEGSGYFLDKIEREDFLRKQRTFDNGSIPHQIHLQEMRAIIRRQAEFYPFLADNQDRIEKILTFRIPYYVGPLARGKSDFAWLSRKSADKITPWNFDEIVDKESSAEAFINRMTNYDLYLPNQKVLPKHSLLYEKFTVYNELTKVKYKTEQGKTAFFDANMKQEIFDGVFKVYRKVTKDKLMDFLEKEFDEFRIVDLTGLDKENKAFNASYGTYHDLRKILDKDFLDNSKNEKILEDIVLTLTLFEDREMIRKRLKNYSDLLTKEQLKKLERRHYTGWGRLSAELIHGIRNKESRKTILDYLIDDGNSNRNFMQLINDDALSFKEEIAKAQVIGETDNLNQVVSDIAGSLAIKKGILQSLKIVDELVKIMGHQPENIVVEMARENQFTNQGRRNSQQRLKGLTDSIKEFGSQILKEHPVENSQLQNDRLFLYYLQNGRDMYTGEELDIDYLSQYDIDHIIPQAFIKDNSIDNRVLTSSKENRGKSDDVPSKDVVRKMKSYWSKLLSAKLITQRKFDNLTKGERGGLTDDDKAGFIKRQLVETRQITKHVARILDERFNTETDENNKKIRQVKIVTLKSNLVSNFRKEFELYKVREINDYHHAHDAYLNAVIGKALLGVYPQLEPEFVYGDYPHFHGHKENKATAKKFFYSNIMNFFKKDDVRTDKNGEIIWKKDEYISNIKKVLSYPQVNIVKKVEEQTGGFFKESILPKGDSDKLIPRKTKKFYWDTKKYGGFDSPIVAYSILVIADIEKGKSKKLKTVKALVGVTIMEKMTFERDPVAFLERKGYRNVQEENIIKLPKYSLFKLENGRKRLLASARELQKGNEIVLPNHLGTLLYHAKNIHKVDEPKHLDYVDKHKDEFKELLDVVSNFSKKYTLAEGNLEKIKELYAQNNGEDLKELASSFINLLTFTAIGAPATFKFFDKNIDRKRYTSTTEILNATLIHQSITGLYETRIDLSKLGGD

SEQ ID NO: 147 - protein, 1345 aa, Streptococcus mutans
MKKPYSIGLDIGTNSVGWAVVTDDYKVPAKKMKVLGNTDKSHIKKNLLGALLFDSGNTAEDRRLKRTARRRYTRRRNRILYLQEIFSEEMGKVNDSFFHRLEDSFLVTEDKRGERHPIFGNLEEEVKYHENFPTIYHLRQYLADNPEKVDLRLVYLALAHIIKFRGHFLIEGKFDTRNNDVQRLFQEFLAVYDNTFENSSLQEQNVQVEEILTDKISKSAKKDRVLKLFPNEKSNGRFAEFLKLIVGNQADFKKHFELEEKAPLQFSKDTYEEELEVLLAQIGDNYAELFLSAKKLYDSILLSGILTVTDVSTKAPLSASMIQRYNEHQMDLAQLKQFIRQKLSDKYNEVFSDVSKDGYAGYIDGKTNQEAFYKYLKGLLNKIEGSGYFLDKIEREDFLRKQRTFDNGSIPHQIHLQEMRAIIRRQAEFYPFLADNQDRIEKILTFRIPYYVGPLARGKSDFAWLSRKSADKITPWNFDEIVDKESSAEAFINRMTNYDLYLPNQKVLPKHSLLYEKFTVYNELTKVKYKTEQGKTAFFDANMKQEIFDGVFKVYRKVTKDKLMDFLEKEFDEFRIVDLTGLDKENKVFNASYGTYHDLCKILDKDFLDNSKNEKILEDIVLTLTLFEDREMIRKRLENYSDLLTKEQVKKLERRHYTGWGRLSAELIHGIRNKESRKTILDYLIDDGNSNRNFMQLINDDALSFKEEIAKAQVIGETDNLNQVVSDIAGSPAIKKGILQSLKIVDELVKIMGHQPENIVVEMARENQFTKQGRRNSQQRLKGLTDSIKEFGSQILKEHPVENSQLQNDRLFLYYLQNGRDMYTGEELDIDYLSQYDIDHIIPQAFIKDNSIDNRVLTSSKENRGKSDDVPSKDVVRKMKSYWSKLLSAKLITQRKFDNLTKAERGGLTDDDKAGFIKRQLVETRQITKHVARILDERFYTETDENNKKIRQVKIVTLKSNLVSNFRKEFELYKVREINDYHHAHDAYLNAVIGKALLGVYPQLEPEFVYGDYPHFHGHKENKATAKKFFYSNIMNFFKKDDVRTDKNGEIIWKKDEYISNIKKVLSYPQVNIVKKVEEQTGGFSKESILPKGNSDKLIPRKTKKFYWDTKKYGGFDSPIVAYSILVIADIEKGKSKKLKTVKALVGVTIMEKMTFERDPIAFLERKGYRNVQEENIIKLPKYSLFKLENGRKRLLASARELQKGNEIVLPNHLGTLLYHAKNIHKVDEPKHLDYVDKHKDEFKELLDVVSNFSKKYTLAEGNLEKIKELYAQNNGEDLKELASSFINLLTFTAIGAPAAFKFFDKNIDRKRYTSTTEILNATLIHQSITGLYETRIDLSKLGGD

SEQ ID NO: 148 - protein, 1345 aa, Streptococcus mutans
MKKPYSIGLDIGTNSVGWAVVTDDYKVPAKKMKVLGNTDKSHIKKNLLGALLFDSGNTAEDRRLKRTARRRYTRRRNRILYLQEIFSEEMGKVDDSFFHRLEDSFLVTEDKRGERHPIFGNLEEEVKYHENFPTIYHLRQYLADNPEKTDLRLVYLALAHIIKFGGHFLIEGKFDTRNNDVQRLFQEFLAVYDNTFENSSLQEQNVQVEEILTDKISKSAKKDRVLKLFPNEKSNGRFAEFLKLIVGNQADFKKHFELEEKAPLQFSKDIYEEELEVLLAQIGDNYAELFLSAKKLYDSILLSGILTVTDVSTKAPLSASMIQRYNEHQMDLAQLKQFIRQKLSDKYNEVFSDVSKDGYAGYIDGKTNQEAFYKYLKGLLNKIEGSGYFLDKIEREDFLRKQRTFDNGSIPHQIHLQEMRAIIRRQAEFYPFLADNQDRIEKILTFRIPYYVGPLARGKSDFAWLSRKSADKITPWNFDEIVDKESSVEAFINRMTNYDLYLPNQKVLPKHSLLYEKFTVYNELTKVKYKTEQGKTAFFDANMKQEIFDGVFKVYRKVTKDKLMDFLEKEFDEFRIVDLTGLDKENKAFNASYGTYHDLRKILDKDFLDNSKNEKILEDIVLTLTLFEDREMIRKRLKNYSDLLTKEQLKKLERRHYTGWGRLSAELIHGIRNKESRKTILDYLIDDGNSNRNFMQLINDDALSFKEEIAKAQVIGETDNLNQVVSDIAGSPAIKKGILQSLKIVDELVKIMGHQPENIVVEMARENQFTNQGRRNSQQRLKGLTDSIKEFGSQILKEHPVENSQLQNDRLFLYYLQNGRDMYTGEELDIDYLSQYDIDHIIPQAFIKDNSIDNRVLTSSKENRGKSDDVPSKNVVRKMKSYWSKLLSAKLITQRKFDNLTKAERGGLTDDDKAGFIKRQLVETRQITKHVARILDERFHTETDENNKKIRQVKIVTLKSNLVSNFRKEFELYKVREINDYHHAHDAYLNAVIGKALLGVYPQLEPEFVYGDYPHFHGHKENKATAKKFFYSNIMNFFKKDDVRTDKNGEIIWKKDEHISNIKKVLSYPQVNIVKKVEEQTGGFSKESILPKGNSDKLIPRKTKKFYWDTKKYGGFDSPIVAYSILVIADIEKGKSKKLKTVKALVGVTIMEKMTFERDPVAFLERKGYRNVQEENIIKLPKYSLFKLENGRKRLLASARELQKGNEIVLPNHLGTLLYHAKNIHKVDEPKHLDYVDKHKDEFKELLDVVSNFSKKYTLAEGNLEKIKELYAQNNGEDLKELASSFINLLTFTAIGAPATFKFFDKNIDRKRYTSTTEILNATLIHQSITGLYETRIDLSKLGGD

SEQ ID NO: 149 - protein, 1345 aa, Streptococcus mutans
MKKPYSIGLDIGTNSVGWAVVTDDYKVPAKKMKVLGNTDKSHIKKNLLGALLFDSGNTAEDRRLKRTARRRYTRRRNRILYLQEIFAEEMMQVDESFFQRLDDSFLVEEDKRGSRYPIFGTLKEEKKYHKEFKTIYHLREKLANSTEKADLRLVYLSLAHMIKFRGHFLIEGQLKAENTNVQALFKDFVEVYDKTVEESHLSEMTVDALSILTEKVSKSRRLENLVECYPTEKKNTLFGNLIALSLGLQPNFKTNFQLSEDAKLQFSKDTYEEDLEGLLGEIGDEYADLFASAKNLYDAILLSGILAVDDNTTKAPLSASMVKRYKEHKEELAAFKRFIKEKLPKKYEEIFKDDTKNGYAGYVGADATEEEFYKYVKGILNKVEGADVWLDKIDREDFLRKQRTFDNGSIPHQIHLQEMHAILRRQGEHYPFLKENQDKIEKILTFRIPYYVGPLVRKGSRFAWAEYKADEKITPWNFDDILDKEKSAEKFITRMTLNDLYLPEEKVLPKHSLLYETFTVYNELTKVKYVNEQGEAKFFDANMKQEIFDHVFKENRKVTKDKLLNYLNKEFEEFRIVNLTGLDKENKVFNSSLGTYHDLRKILNKSFLDNKENEQIIEDIIQTLTLFEDREMIRQRLQKYSDIFTKAQLKKLERRHYTGWGRLSYKLINGIRDKQSNKTILGYLIDDGYSNRNFMQLINDDALSFKEEIAKAQVIGEMDGLNQVVSDIAGSPAIKKGILQSLKIVDELVKVMGHNPANIVIEMARENQTTAKGRRSSQKRYKRLEEAIKDLNHKILKEHPTDNQALQNDRLFLYYLQNGRDMYTEDPLDINRLSDYDIDHIIPQAFIKDNSIDNRVLTRSDKNRGKSDDVPSEEVVHKMKPFWSKLLSAKLITQRKFDNLTKAERGGLTDDDKAGFIKRQLVETRQITKHVARILDERFNTETDENNKKIRQVKIVTLKSNLVSNFRKEFELYKVREINDYHHAHDAYLNAVIGKALLGVYPQLEPEFVYGDYPHFHGHKENKATAKKFFYSNIMNFFKKGDVRTDKNGEIIWKKDEHISNIKKVLSYPQVNIVKKVEEQTGGFSKESILPKGNSDKLIPRKTKKFYWDTKKYGGFDSPIVAYSILVIADIEKGKSKKLKTVKALVGVTIMEKMTFERDPVAFLERKGYRNVQEENIIKLPKYSLFKLENGRKRLLASARELQKGNEIVLPNHLETLLYHAKNIHKVDEPKHLDYVDKHKDEFKELLDVVSNFSKKYTLAEGNLEKIKELYAQNNGEDLKELASSFINLLTFTAIGAPAAFKFFDKNIDRKRYTSTTEILNATLIHQSITGLYETRIDLNKLGGD

SEQ ID NO: 150 - protein, 1345 aa, Streptococcus mutans
MKKPYSIGLDIGTNSVGWAVVTDDYKVPAKKMKVLGNTDKSHIKKNLLGALLFDSGNTAEDRRLKRTARRRYTRRRNRILYLQEIFSEEMDKVDDSFFHRLEDSFLVTEDKRGERHPIFGNLEEEVKYHENFPTIYHLRQYLADNPEKVDLRLVYLALAHIIKFRGHFLIEGKFDTRNNDVQRLFQEFLAVYDNTFENSSLQEQNVQVEEILTDKISKSAKKDRVLKLFPNEKSNGRFAEFLKLIVGNQADFKKHFELEEKAPLQFSKDTYEEELEVLLAQIGDNYAELFLSAKKLYDSILLSGILTVTDVSTKAPLSASMIQRYNEHQMDLAQLKQFIRQKLSDKYNEVFSDVSKDGYAGYIDGKTNQEAFYKYLKGLLNKIEGSGYFLDKIEREDFLRKQRTFDNGSIPHQIHLQEMRAIIRRQAEFYPFLADNQDRIEKILTFRIPYYVGPLARGKSDFAWLSRKSADKITPWNFDEIVDKESSAEAFINRMTNYDLYLPNQKVLPKHSLLYEKFTVYNELTKVKYKTEQGKTAFFDANMKQEIFDGVFKVYRKVTKDKLMDFLEKEFDEFRIVDLTGLDKENKVFNASYGTYHDLCKILDKDFLDNSKNEKILEDIVLTLTLFEDREMIRKRLENYSDLLTKEQVKKLERRHYTGWGRLSAELIHGIRNKESRKTILDYLIDDGNSNRNFMQLINDDALSFKEEIAKAQVIGETDNLNQVVSDIAGSPAIKKGILQSLKIVDELVKIMGHQPENIVVEMARENQFTKQGRRNSQQRLKGLTDSIKEFGSQILKEHPVENSQLQNDRLFLYYLQNGRDMYTGEELDIDYLSQYDIDHIIPQAFIKDNSIDNRVLTSSKENRGKSDDVPSKDVVRKMKSYWSKLLSAKLITQRKFDNLTKAERGGLTDDDKAGFIKRQLVETRQITKHVARILDERFYTETDENNKKIRQVKIVTLKSNLVSNFRKEFELYKVREINDYHHAHDAYLNAVIGKALLGVYPQLEPEFVYGDYPHFHGHKENKATAKKFFYSNIMNFFKKDDVRTDKNGEIIWKKDEHISNIKKVLSYPQVNIVKKVEEQTGGFSKESILPKGNSDKLIPRKTKKFYWDTKKYGGFDSPIVAYSILVIADIEKGKSKKLKTVKALVGVTIMEKMTFERDPVAFLERKGYRNVQEENIIKLPKYSLFKLENGRKRLLASARELQKGNEIVLPNHLGTLLYHAKNIHKVDEPKHLDYVDKHKDEFKELLDVVSNFSKKYTLAEGNLEKIKELYAQNNGEDLKELASSFINLLTFTAIGAPATFKFFDKNIDRKRYTSTTEILNATLIHQSITGLYETRIDLSKLGGD

SEQ ID NO: 151 - protein, 1345 aa, Streptococcus mutans
MKKPYSIGLDIGTNSVGWAVVTDDYKVPAKKMKVLGNTDKSHIKKNLLGALLFDSGNTAEDRRLKRTARRRYTRRRNRILYLQEIFSEEMGKVDDSFFHRLEDSFLVTEDKRGERHPIFGNLEEEVKYHENFPTIYHLRQYLADNPEKVDLRLVYLALAHIIKFRGHFLIEGKFDTRNNDVQKLFQEFLAVYDNTFENSSLQEQNVQVEEILTDKISKSAKKDRVLKLFPNEKSNGRFAEFLKLIVGNQADFKKHFELEEKAPLQLSKDTYEEELEVLLAQIGDNYAELFLSAKKLYDSILLSGILTVTDVSTKAPLSASMIQRYNEHQMDLAQLKQFIRQKLSDKYNEVFSDVSKDGYAGYIDGKTNQEAFYKYLKGLLNKIEGSGYFLDKIEREDFLRKQRTFDNGSIPHQIHLQEMRAIIRRQAEFYPFLADNQDRIEKILTFRIPYYVGPLARGKSDFAWLSRKSADKITPWNFDEIVDKESSVEAFINRMTNYDLYLPNQKVLPKHSLLYEKFTVYNELTKVKYKTEQGKTAFFDANMKQEIFDGVFKVYRKVTKDKLMDFLEKEFDEFRIVDLTGLDKENKAFNASYGTYHDLRKILDKDFLDNSKNEKILEDIVLTLTLFEDREMIRKRLENYSDLLTKEQVKKLERRHYTGWGRLSAELIHGIRNKESRKTLLDYLIDDGNSNRNFMQLINDDALSFKEEIAKAQVIGETDNLNQVVSDIAGSPAIKKGILQSLKIVDELVKIMGHQPENIVVEMARENQFTNQGRRNSQQRLKGLTDSIKEFGSQILKEHPVENSQLQNDRLFLYYLQNGRDMYTGEELDIDYLSQYDIDHIIPQAFIKDNSIDNRVLTSSKENRGKSDDVPSKDVVRKMKSYWSKLLSAKLITQRKFDNLTKAERGGLTDDDKAGFIKRQLVETRQITKHVARILDERFNTETDENNKKIRQVKIVTLKSNLVSNFRKEFELYKVREINDYHHAHDAYLNAVIGKALLGVYPQLEPEFVYGDYPHFHGHKENKATAKKFFYSNIMNFFKKDDVRTDKNGEIIWKKDEYISNIKKVLSYPQVNIVKKVEEQTGGFSKESILPKGNSDKLIPRKTKKFYWDTKKYGGFDSPIVAYSILVIADIEKGKSKKLKTVKALVGVTIMEKMTFERDPIAFLERKGYRNVQEENIIKLPKYSLFKLENGRKRLLASARELQKGNEIVLPNHLGTLLYHAKNIHKVDEPKHLDYVDKHKDEFKELLDVVSNFSKKYTLAEGNLEKIKELYAQNNGEDLKELASSFINLLTFTAIGAPATFKFFDKNIDRKRYTSTTEILNATLIHQSITGLYETRIDLSKLGGD

SEQ ID NO: 152 - protein, 1345 aa, Streptococcus mutans
MKKPYSIGLDIGTNSVGWAVVTDDYKVPAKKMKVLGNTDKSHIKKNLLGALLFDSGNTAEDRRLKRTARRRYTRRRNRILYLQEIFSEEMGKVDDSFFHRLEDSFLVTEDKRGERHPIFGNLEEEVKYHENFPTIYHLRQYLADNPEKTDLRLVYLALAHIIKFRGHFLIEGKFDTRNNDVQRLFQEFLAVYDNTFENSSLQEQNVQVEEILTDKISKSAKKDRVLKLFPNEKSNGRFAEFLKLIVGNQADFKKHFELEEKAPLQFSKDIYEEELEVLLAQIGDNYAELFLSAKKLYDSILLSGILTVTDVSTKAPLSASMIQRYNEHQMDLAQLKQFIRQKLSDKYNEVFSDVSKDGYAGYIDGKTNQEAFYKYLKGLLNKIEGSGYFLDKIEREDFLRKQRTFDNGSIPHQIHLQEMRAIIRRQAEFYPFLADNQDRIEKILTFRIPYYVGPLARGKSDFAWLSRKSADKITPWNFDEIVDKESSAEAFINRMTNYDLYLPNQKVLPKHSLLYEKFTVYNELTKVKYKTEQGKTAFFDANMKQEIFDGVFKVYRKVTKDKLMDFLEKEFDEFRIVDLTGLDKENKAFNASYGTYHDLRKILDKDFLDNSKNEKILEDIVLTLTLFEDREMIRKRLKNYSDLLTKEQLKKLERRHYTGWGRLSAELIHGIRNKESRKTILDYLIDDGNSNRNFMQLINDDALSFKEEIAKAQVIGETDNLNQVVSDIAGSLAIKKGILQSLKIVDELVKIMGHQPENIVVEMARENQFTNQGRRNSQQRLKGLTDSIKEFGSQILKEHPVENSQLQNDRLFLYYLQNGRDMYTGEELDIDYLSQYDIDHIIPQAFIKDNSIDNRVLTSSKENRGKSDDVPSKDVVRKMKSYWSKLLSAKLITQRKFDNLTKGERGGLTDDDKAGFIKHQLVETRQITKHVARILDERFNTETDENNKKIRQVKIVTLKSNLVSNFRKEFELYKVREINDYHHAHDAYLNAVIGKALLGVYPQLEPEFVYGDYPHFHGHKENKATAKKFFYSNIMNFFKKDDVRTDKNGEIIWKKDEYISNIKKVLSYPQVNIVKKVEEQTGGFFKESILPKGDSDKLIPRKTKKFYWDTKKYGGFDSPIVAYSILVIADIEKGKSKKLKTVKALVGVTIMEKMTFERDPVAFLERKGYRNVQEENIIKLPKYSLFKLENGRKRLLASARELQKGNEIVLPNHLGTLLYHAKNIHKVDEPKHLDYVDKHKDEFKELLDVVSNFSKKYTLAEGNLEKIKELYAQNNGEDLKELASSFINLLTFTAIGAPATFKFFDKNIDRKRYTSTTEILNATLIHQSITGLYETRIDLSKLGGD

SEQ ID NO: 153 - protein, 1345 aa, Streptococcus mutans
MKKPYSIGLDIGTNSVGWAVVTDDYKVPAKKMKVLGNTDKSHIKKNLLGALLFDSGNTAEDRRLKRTARRRYTRRRNRILYLQEIFSEEMGKVDDSFFHRLEDSFLVTEDKRGERHPIFGNLEEEVKYHENFPTIYHLRQYLADNPEKTDLRLVYLALAHIIKFRGHFLIEGKFDTRNNDVQRLFQEFLAVYDNTFENSSLQEQNVQVEEILTDKISKSAKKDRVLKLFPNEKSNGRFAEFLKLIVGNQADFKKHFELEEKAPLQFSKDIYEEELEVLLAQIGDNYAELFLSAKKLYDSILLSGILTVTDVSTKAPLSASMIQRYNEHQMDLAQLKQFIRQKLSDKYNEVFSDVSKDGYAGYIDGKTNQEAFYKYLKGLLNKIEGSGYFLDKIEREDFLRKQRTFDNGSIPHQIHLQEMRAIIRRQAEFYPFLADNQDRIEKILTFRIPYYVGPLARGKSDFAWLSRKSADKITPWNFDEIVDKESSAEAFINRMTNYDLYLPNQKVLPKHSLLYEKFTVYNELTKVKYKTEQGKTAFFDANMKQEIFDGVFKVYRKVTKDKLMDFLEKEFDEFRIVDLTGLDKENKAFNASYGTYHDLRKILDKDFLDNSKNEKILEDIVLTLTLFEDREMIRKRLENYSDLLTKEQVKKLERRHYTGWGRLSAELIHGIRNKESRKTLLDYLIDDGNSNRNFMQLINDDALSFKEEIAKAQVIGETDNLNQVVSDIAGSPAIKKGILQSLKIVDELVKIMGHQPENIVVEMARENQFTNQGQRNSQQRLKGLTDSIKEFGSQILKEHPVENSQLQNDRLFLYYLQNGRDMYTGEELDIDYLSQYDIDHIIPQAFIKDNSIDNRVLTSSKENRGKSDDVPSKDVVRKMKSYWSKLLSAKLITQRKFDNLTKAERGGLTDDDKAGFIKRQLVETRQITKHVARILDERFNTETDENNKKIRQVKIVTLKSNLVSNFRKEFELYKVREINDYHHAHDAYLNAVIGKALLGVYPQLEPEFVYGDYPHFHGHKENKATAKKFFYSNIMNFFKKDDVRTDKNGEIIWKKDEYISNIKKVLSYPQVNIVKKVEEQTGGFSKESILPKGDSDKLIPRKTKKFYWDTKKYGGFDSPIVAYSILVIADIEKGKSKKLKTVKALVGVTIMEKMTFERDPVAFLERKGYRNVQEENIIKLPKYSLFKLENGRKRLLASARELQKGNEIVLPDHLGTLLYHAKNIHKVDEPKHLDYVDKHKDEFKELLDVVSNFSKKYTLAEGNLEKIKELYAQNNGEDLKELASSFINLLTFTAIGAPATFKFFDKNIDRKRYTSTTEILNATLIHQSITGLYETRIDLSKLGGD

SEQ ID NO: 154 - protein, 1345 aa, Streptococcus mutans
MKKPYSIGLDIGTNSVGWAVVTDDYKVPAKKMKVLGNTDKSHIKKNLLGALLFDSGNTAADRRLKRTARRRYTRRRNRILYLQEIFAEEMSKVDDSFFHRLEDSFLVTEDKRGERHPIFGNLEEEVKYHENFPTIYHLRQYLADNPEKVDLRLVYLALAHIIKFRGHFLIEGKFDTRNNDVQRLFQEFLAVYDNTFENSSLQEQNVQVEEILTDKISKSAKKDRVLKLFPNEKSNGRFAEFLKLIVGNQADFKKHFELEEKAPLQFSKDTYEEELEVLLAQIGDNYAELFLSAKKLYDSILLSGILTVTDVSTKAPLSASMIQRYNEHQMDLAQLKQFIRQKLSDKYNEVFSDVSKDGYAGYIDGKTNQEAFYKYLKGLLNKIEGSGYFLDKIEREDFLRKQRTFDNGSIPHQIHLQEMRAIIRRQAEFYPFLADNQDRIEKILTFRIPYYVGPLARGKSDFAWLSRKSADKITPWNFDEIVDKESSAEAFINRMTNYDLYLPNQKVLPKHSLLYEKFTVYNELTKVKYKTEQGKTAFFDANMKQEIFDGVFKVYRKVTKDKLMDFLEKEFDEFRIVDLTGLDKENKAFNASYGTYHDLRKILDKDFLDNSKNEKILEDIVLTLTLFEDREMIRKRLENYSDLLTKEQVKKLERRHYTGWGRLSAELIHGIRNKESRKTILDYLIDDGNSNRNFMQLINDDALSFKEEIAKAQVIGETDNLNQVVSDIAGSPAIKKGILQSLKIVDELVKIMGHQPENIVVEMARENQFTNQGRRNSQQRLKGLTDSIKEFGSQILKEHPVKHSQLQNDRLFLYYLQNGRDMYTGEELDIDYLSQYDIDHIIPQAFIKDNSIDNRVLTSSKENRGKSDDVPSKNVVRKMKSYWSKLLSAKLITQRKFDNLTKAERGGLTDDDKAGFIKRQLVETRQITKHVARILDERFHTETDENNKKIRQVKIVTLKSNLVSNFRKEFELYKVREINDYHHAHDAYLNAVIGKALLGVYPQLEPEFVYGDYPHFHGHKENKATAKKFFYSNIMNFFKKDDVRTDKNGEIIWKKDEHISNIKKVLSYPQVNIVKKVEEQTGGFSKESILPKGNSDKLIPRKTKKFYWDTKKYGGFDSPIVAYSILVIADIEKGKSKKLKTVKALVGVTIMEKMTFERDPVAFLERKGYRNVQEENIIKLPKYSLFKLENGRKRLLASARELQKGNEIVLPNHLGTLLYHAKNIHKVDEPKHLDYVDKHKDEFKELLDVVSNFSKKYTLAEGNLEKIKELYAQNNGEDLKELASSFINLLTFTAIGAPATFKFFDKNIDRKRYTSTTEILNATLIHQSITGLYETRIDLSKLGGD

SEQ ID NO: 155 - protein, 1345 aa, Streptococcus mutans
MKKPYSIGLDIGTNSVGWAVVTDDYKVPDKKMKVLGNTDKSHIKKNLLGALLFDSGNTAEDRRLKRTARRRYTRRRNRILYLQEIFSEEMGKVDDSFFHRLEDSFLVTEDKRGERHPIFGNLEEEVKYHENFPTIYHLRQYLADNPEKTDLRLVYLALAHIIKFRGHFLIEGKFDTRNNDVQRLFQEFLAVYDNTFENSSLQEQNVQVEEILTDKISKSAKKDRVLKLFPNEKSNGRFAEFLKLIVGNQADFKKHFELEEKAPLQFSKDIYEEELEVLLAQIGDNYAELFLSAKKLYDSILLSGILTVTDVSTKAPLSASMIQRYNEHQMDLAQLKQFIRQKLSDKYNEVFSDVSKDGYAGYIDGKTNQEAFYKYLKGLLNKIEGSGYFLDKIEREDFLRKQRTFDNGSIPHQIHLQEMRAIIRRQAEFYPFLADNQDRIEKILTFRIPYYVGPLARGKSDFAWLSRKSADKITPWNFDEIVDKESSVEAFINRMTNYDLYLPNQKVLPKHSLLYEKFTVYNELTKVKYKTEQGKTAFFDANMKQEIFDGVFKVYRKVTKDKLMDFLEKEFDEFRIVDLTGLDKENKAFNASYGTYHDLRKILDKDFLDNSKNEKILEDIVLTLTLFEDREMIRKRLKNYSDLLTKEQLKKLERRHYTGWGRLSAELIHGIRNKESRKTILDYLIDDGNSNRNFMQLINDDALSFKEEIAKAQVIGETDNLNQVVSDIAGSPAIKKGILQSLKIVDELVKIMGHQPENIVVEMARENQFTNQGRRNSQQRLKGLTDSIKEFGSQILKEHPVENSQLQNDRLFLYYLQNGRDMYTGEELDIDYLSQYDIDHIIPQAFIKDNSIDNRVLTSSKENRGKSDDVPSKDVVRKMKSYWSKLLSAKLITQRKFDNLTKAERGGLTDDDKAGFIKRQLVETRQITKHVARILDERFYTETDENNKKIRQVKIVTLKSNLVSNFRKEFELYKVREINDYHHAHDAYLNAVIGKALLGVYPQLEPEFVYGDYPHFHGHKENKATAKKFFYSNIMNFFKKDDVRTDKNGEIIWKKDEHISNIKKVLSYPQVNIVKKVEEQTGGFSKESILPKGNSDKLIPRKTKKFYWDTKKYGGFDSPIVAYSILVIADIEKGKSKKLKTVKALVGVTIMEKMTFERDPVAFLERKGYRNVQEENIIKLPKYSLFKLENGRKRLLASARELQKGNEIVLPNHLGTLLYHAKNIHKVDEPKHLDYVDKHKDEFKELLDVVSNFSKKYTLAEGNLEKIKELYAQNNGEDLKELASSFINLLTFTAIGAPATFKFFDKNIDRKRYTSTTEILNATLIHQSITGLYETRIDLSKLGGD

SEQ ID NO: 156 - protein, 1345 aa, Streptococcus mutans
MKKPYSIGLDIGTNSVGWAVVTDDYKVPAKKMKVLGNTDKSHIKKNLLGALLFDSGNTAADRRLKRTARRRYTRRRNRILYLQEIFAEEMSKVDDSFFHRLEDSFLVTEDKRGERHPIFGNLEEEVKYHENFPTIYHLRQYLADNPEKVDLRLVYLALAHIIKFRGHFLIEGKFDTRNNDVQRLFQEFLAVYDNTFENSSLQEQNVQVEEILTDKISKSAKKDRVLKLFPNEKSNGRFAEFLKLIVGNQADFKKHFELEEKAPLQFSKDTYEEELEVLLAQIGDNYAELFLSAKKLYDSILLSGILTVTDVSTKAPLSASMIQRYNEHQMDLAQLKQFIRQKLSDKYNEVFSDVSKDGYAGYIDGKTNQEAFYKYLKGLLNKIEGSGYFLDKIEREDFLRKQRTFDNGSIPHQIHLQEMRAIIRRQAEFYPFLADNQDRIEKILTFRIPYYVGPLARGKSDFAWLSRKSADKITPWNFDEIVDKESSAEAFINRMTNYDLYLPNQKVLPKHSLLYEKFTVYNELTKVKYKTEQGKTAFFDANMKQEIFDGVFKVYRKVTKDKLMDFLEKEFDEFRIVDLTGLDKENKAFNASYGTYHDLRKILDKDFLDNSKNEKILEDIVLTLTLFEDREMIRKRLENYSDLLTKEQVKKLERRHYTGWGRLSAELIHGIRNKESRKTILDYLIDDGNSNRNFMQLINDDALSFKEEIAKAQVIGETDNLNQVVSDIAGSPAIKKGILQSLKIVDELVKIMGHQPENIVVEMARENQFTNQGRRNSQQRLKGLTDSIKEFGSQILKEHPVENSQLQNDRLFLYYLQNGRDMYTGEELDIDYLSQYDIDHIIPQAFIKDNSIDNRVLTSSKENRGKSDDVPSKNVVRKMKSYWSKLLSAKLITQRKFDNLTKAERGGLTDDDKAGFIKRQLVETRQITKHVARILDERFHTETDENNKKIRQVKIVTLKSNLVSNFRKEFELYKVREINDYHHAHDAYLNAVIGKALLGVYPQLEPEFVYGDYPHFHGHKENKATAKKFFYSNIMNFFKKDDVRTDKNGEIIWKKDEHISNIKKVLSYPQVNIVKKVEEQTGGFSKESILPKGNSDKLIPRKTKKFYWDTKKYGGFDSPIVAYSILVIADIEKGKSKKLKTVKALVGVTIMEKMTFERDPVAFLERKGYRNVQEENIIKLPKYSLFKLENGRKRLLASARELQKGNEIVLPNHLGTLLYHAKNIHKVDEPKHLDYVDKHKDEFKELLDVVSNFSKKYTLAEGNLEKIKELYAQNNGEDLKELASSFINLLTFTAIGAPATFKFFDKNIDRKRYTSTTEILNATLIHQSITGLYETRIDLSKLGGD

SEQ ID NO: 157 - protein, 1345 aa, Streptococcus mutans
MKKPYSIGLDIGTNSVGWAVVTDDYKVPAKKMKVLGNTDKSHIEKNLLGALLFDSGNTAEDRRLKRTARRRYTRRRNRILYLQEIFSEEMGKVDDSFFHRLEDSFLVTEDKRGERHPIFGNLEEEVKYHENFPTIYHLRQYLADNPEKVDLRLVYLALAHIIKFRGHFLIEGKFDTRNNDVQRLFQEFLAVYDNTFENSSLQEQNVQVEEILTDKISKSAKKDRVLKLFPNEKSNGRFAEFLKLIIGNQADFKKHFELEEKAPLQFSKDTYEEELEVLLAQIGDNYAELFLSAKKLYDSILLSGILTVTDVGTQAPLSASMIQRYNEHQMDLAQLKQFIRQKLSDKYNEVFSDVSKDGYAGYIDGKTNQEAFYKYLKGLLNKIEGSGYFLDKIEREDFLRKQRTFDNGSIPHQIHLQEMRAIIRRQAEFYPFLADNQDRIEKLLTFRIPYYVGPLARGKSDFAWLSRKSADKITPWNFDEIVDKESSAEAFINRMTNYDLYLPNQKVLPKHSLLYEKFTVYNELTKVKYKTEQGKTAFFDANMKQEIFDGVFKVYRKVTKDKLMDFLEKEFDEFRIVDLTGLDKENKVFNASYGTYHDLCKILDKDFLDNSKNEKILEDIVLTLTLFEDREMIRKRLENYSDLLTKEQVKKLERRHYTGWGRLSAELIHGIRNKESRKTILDYLIDDGNSNRNFMQLINDDALSFKEEIAKAQVIGETDNLNQVVSDIAGSPAIKKGILQSLKIVDELVKIMGHQPENIVVEMARENQFTNQGRRNSQQRLKGLTDSIKEFGSQILKEHPVENSQLQNDRLFLYYLQNGRDMYTGEELDIDYLSQYDIDHIIPQAFIKDNSIDNRVLTSSKENRGKSDDVPSKDVVRKMKSYWSKLLSAKLITQRKFDNLTKAERGGLTDDDKAGFIKRQLVETRQITKHVARILDERFHTETDENNKKIRQVKIVTLKSNLVSNFRKEFELYKVREINDYHHAHDAYLNAVIGKALLGVYPQLEPEFVYGDYPHFHGHKENKATAKKFFYSNIMNFFKKDDVRTDKNGEIIWKKDEHISNIKKVLSYPQVNIVKKVEEQTGGFSKESILPKGNSDKLIPRKTKKFYWDTKKYGGFDSPIVAYSILVIADIEKGKSKKLKTVKALVGVTIMEKMTFERDPVAFLERKGYRNVQEENIIKLPKYSLFKLENGRKRLLASARELQKGNEIVLPNHLGTLLYHAKNIHKVDEPKHLDYVDKHKDEFKELLDVVSNFSKKYTLAEGNLEKIKELYAQNNGEDLKELASSFINLLTFTAIGAPATFKFFDKNIDRKRYTSTTEILNATLIHQSITGLYETRIDLNKLGGD

SEQ ID NO: 158 - protein, 1345 aa, Streptococcus mutans
MKKPYSIGLDIGTNSVGWAVVTDDYKVPAKKMKVLGNTDKSHIKKNLLGALLFDSGNTAEDRRLKRTARRRYTRRRNRILYLQEIFSEEMGKVDDSFFHRLEDSFLVTEDKRGERHPIFGNLEEEVKYHENFPTIYHLRQYLADNPEKVDLRLVYLALAHIIKFRGHFLIEGKFDTRNNDVQKLFQEFLAVYDNTFENSSLQEQNVQVEEILTDKISKSAKKDRVLKLFPNEKSNGRFAEFLKLIVGNQADFKKHFELEEKAPLQLSKDTYEEELEVLLAQIGDNYAELFLSAKKLYDSILLSGILTVTDVSTKAPLSASMIQRYNEHQMDLAQLKQFIRQKLSDKYNEVFSDVSKDGYAGYIDGKTNQEAFYKYLKGLLNKIEGSGYFLDKIEREDFLRKQRTFDNGSIPHQIHLQEMRAIIRRQAEFYPFLADNQDRIEKILTFRIPYYVGPLARGKSDFAWLSRKSADKITPWNFDEIVDKESSVEAFINRMTNYDLYLPNQKVLPKHSLLYEKFTVYNELTKVKYKTEQGKTAFFDANMKQEIFDGVFKVYRKVTKDKLMDFLEKEFDEFRIVDLTGLDKENKAFNASYGTYHDLRKILDKDFLDNSKNEKILEDIVLTLTLFEDREMIRKRLENYSDLLTKEQVKKLERRHYTGWGRLSAELIHGIRNKESRKTLLDYLIDDGNSNRNFMQLINDDALSFKEEIAKAQVIGETDNLNQVVSDIAGSPAIKKGILQSLKIVDELVKIMGHQPENIVVEMARENQFTNQGRRNSQQRLKGLTDSIKEFGSQILKEHPVENSQLQNDRLFLYYLQNGRDMYTGEELDIDYLSQYDIDHIIPQAFIKDNSIDNRVLTSSKENRGKSDDVPSKDVVRKMKSYWSKLLSAKLITQRKFDNLTKAERGGLTDDDKAGFIKRQLVETRQITKHVARILDERFNTETDENNKKIRQVKIVTLKSNLVSNFRKEFELYKVREINDYHHAHDAYLNAVIGKALLGVYPQLEPEFVYGDYPHFHGHKENKATAKKFFYSNIMNFFKKDDVRTDKNGEIIWKKDEYISNIKKVLSYPQVNIVKKVEEQTGGFSKESILPKGNSDKLIPRKTKKFYWDTKKYGGFDSPIVAYSILVIADIEKGKSKKLKTVKALVGVTIMEKMTFERDPIAFLERKGYRNVQEENIIKLPKYSLFKLENGRKRLLASARELQKGNEIVLPNHLGTLLYHAKNIHKVDEPKHLDYVDKHKDEFKELLDVVSNFSKKYTLAEGNLEKIKELYAQNNGEDLKELASSFINLLTFTAIGAPAAFKFFDKNIDRKRYTSTTEILNATLIHQSITGLYETRIDLSKLGGD

SEQ ID NO: 159 - protein, 1345 aa, Streptococcus mutans
MKKPYSIGLDIGTNSVGWAVVTDDYKVPAKKMKVLGNTDKSHIKKNLLGALLFDSGNTAEDRRLKRTARRRYTRRRNRILYLQEIFSEEMGKVDDSFFHRLEDSFLVTEDKRGECHPIFGNLEEEVKYHENFPTIYHLRQYLADNPEKTDLRLVYLALAHIIKFRGHFLIEGKFDTRNNDVQRLFQEFLAVYDNTFENSSLQEQNVQVEEILTDKISKSAKKDRVLKLFPNEKSNGRFAEFLKLIVGNQADFKKHFELEEKAPLQFSKDTYEEELEVLLAQIGDNYAELFLSAKKLYDSILLSGILTVTDVSTKAPLSASMIQRYNEHQMDLTQLKQFIRQKLSDKYNEVFSDVSKDGYAGYIDGKTNQEAFYKYLKGLLNKIEGNGYFLDKIEREDFLRKQRTFDNGSIPHQIHLQEMRAIIRRQAEFYPFLADNQDRIEKILTFRIPYYVGPLARGKSDFAWLSRKSADKITPWNFDEIVDKESSAEAFINRMTNYDLYLPNQKVLPKHSLLYEKFTVYNELTKVKYKTEQGKTAFFDANMKQEIFDGVFKVYRKVTKDKLMDFLEKEFDEFRIVDLTGLDKENKAFNASYGTYHDLRKILDKDFLDNSKNEKILEDIVLTLTLFEDREMIRKRLENYSDLLTKEQVKKLERRHYTGWGRLSAELIHGIRNKESRKTLLDYLIDDGNSNRNFMQLINDDALSFKEEIAKAQVIGETDNLNQVVSDIAGSPAIKKGILQSLKIVDELVKIMGHQPENIVVEMARENQFTNQGRRNSQQRLKGLTDSIKEFGSQILKEHPVENSQLQNDRLFLYYLQNGRDMYTGEELDIDYLSQYDIDHIIPQAFIKDNSIDNRVLTSSKENRGKSDDVPSKDVVRKMKPYWSKLLSAKLITQRKFDNLTKAERGGLTDDDKAGFIKRQLVETRQITKHVARILDERFNTETDENNKKIRQVKIVTLKSNLVSNFRKEFELYKVREINDYHHAHDAYLNAVIGKALLGVYPQLEPEFVYGDYPHFHGHEENKATAKKFFYSNIMNFFKKDDVRTDKNGEIIWKKDEHISNIKKVLSYPQVNIVKKVEEQTGGFSKESILPKGNSDKLIPRKTKKFYWDTKKYGGFDSPIVAYSILVIADIEKGKSKKLKTVKALVGVTIMEKMTFERDPVAFLERKGYRNVQEENIIKLPKYSLFKLENGRKRLLASARELQKGNEIVLPNHLGTLLYHAKNIHKVDEPKHLDYVDKHKDEFKELLDVVSNFSKKYTLAEGNLEKIKELYAQNNGEDLKELSSSFINLLTFTAIGAPAAFKFFDKNIDRKRYTSTTEILNATLIHQSITGLYETRIDLSKLGGD

SEQ ID NO: 160 - protein, 1345 aa, Streptococcus mutans
MKKPYSIGLDIGTNSVGWAVVTDDYKVPAKKMKVLGNTDKSHIEKNLLGALLFDSGNTAEDRRLKRTARRRYTRRRNRILYLQEIFSEEMGKVDDSFFHRLEDSFLVTEDKRGERHPIFGNLEEEVKYHENFPTIYHLRQYLADNPEKVDLRLVYLALAHIIKFRGHFLIEGKFDTRNNDVQRLFQEFLAVYDNTFENSSLQEQNVQVEEILTDKISKSAKKDRVLKLFPNEKSNGRFAEFLKLIVGNQADFKKHFELEEKVPLQFSKDTYEEELEVLLAQIGDNYAELFLSAKKLYDSILLSGILTVTDVGTKAPLSASMIQRYNEHQMDLAQLKQFIRQKLSDKYNEVFSDVSKDGYAGYIDGKTNQEAFYKYLKGLLNKIEGSGYFLDKIEREDFLRKQRTFDNGSIPHQIHLQEMRAIIRRQAEFYPFLADNQDRIEKLLTFRIPYYVGPLARGKSDFAWLSRKSADKITPWNFDEIVDKESSAEAFINRMTNYDLYLPNQKVLPKHSLLYEKFTVYNELTKVKYKTEQGKTAFFDANMKQEIFDGVFKVYRKVTKDKLMDFLEKEFDEFRIVDLTGLDKENKVFNASYGTYHDLCKILDKDFLDNSKNEKILEDIVLTLTLFEDREMIRKRLENYSDLLTKEQVKKLERRHYTGWGRLSAELIHGIRNKESRKTILDYLIDDGNSNRNFMQLINDDALSFKEEIAKAQVIGETDNLNQVVSDIAGSPAIKKGILQSLKIVDELVKIMGHQPENIVVEMARENQFTNQGRRNSQQRLKGLTDSIKEFGSQILKEHPVENSQLQNDRLFLYYLQNGRDMYTGEELDIDYLSQYDIDHIIPQAFIKDNSIDNRVLTSSKENRGKSDDVPSKDVVRKMKSYWSKLLSAKLITQRKFDNLTKAERGGLTDDDKAGFIKRQLVETRQITKHVARILDERFNTETDENNKKIRQVKIVTLKSNLVSNFRKEFELYKVREINDYHHAHDAYLNAVIGKALLGVYPQLEPEFVYGDYPHFHGHKENKATAKKFFYSNIMNFFKKDDVRTDKNGEIIWKKDEHISNIKKVLSYPQVNIVKKVEEQTGGFSKESILPKGNSDKLIPRKTKKFYWDTKKYGGFDSPIVAYSILVIADIEKGKSKKLKTVKALVGVTIMEKMTFERDPVAFLERKGYRNVQEENIIKLPKYSLFKLENGRKRLLASARELQKGNEIVLPNHLGTLLYHAKNIHKVDEPKHLDYVDKHKDEFKELLDVVSNFSKKYTLAEGNLEKIKELYAQNNGEDLKELASSFINLLTFTAIGAPATFKFFDKNIDRKRYTSTTEILNATLIHQSITGLYETRIDLNKLGGD

SEQ ID NO: 161 - protein, 1345 aa, Streptococcus mutans
MKKPYSIGLDIGTNSVGWAVVTDDYKVPAKKMKVLGNTDKSHIKKNLLGALLFDSGNTAEDRRLKRTARRRYTRRRNRILYLQEIFSEEMGKVDDSFFHRLEDSFLVTEDKRGERHPIFGNLEEEVKYHENFPTIYHLRQYLADNPEKTDLRLVYLALAHIIKFRGHFLIEGKFDTRNNDVQRLFQEFLAVYDNTFENSSLQEQNVQVEEILTDKISKSAKKDRVLKLFPNEKSNGRFAEFLKLIVGNQADFKKHFELEEKAPLQFSKDIYEEELEVLLAQIGDNYAELFLSAKKLYDSILLSGILTVTDVSTKAPLSASMIQRYNEHQMDLAQLKQFIRQKLSDKYNEVFSDVSKDGYAGYIDGKTNQEAFYKYLKGLLNKIEGSGYFLDKIEREDFLRKQRTFDNGSIPHQIHLQEMRAIIRRQAEFYPFLADNQDRIEKILTFRIPYYVGPLARGKSDFAWLSRKSADKITPWNFDEIVDKESSAEAFINRMTNYDLYLPNQKVLPKHSLLYEKFTVYNELTKVKYKTEQGKTAFFDANMKQEIFDGVFKVYRKVTKDKLMDFLEKEFDEFRIVDLTGLDKENKAFNASYGTYHDLRKILDKDFLDNSKNEKILEDIVLTLTLFEDREMIRKRLKNYSDLLTKEQLKKLERRHYTGWGRLSAELIHGIRNKESRKTILDYLIDDGNSNRNFMQLINDDALSFKEEIAKAQVIGETDNLNQVVSDIAGSLAIKKGILQNLKIVDELVKIMGHQPENIVVEMARENQFTNQGRRNSQQRLKGLTDSIKEFGSQILKEHPVENSQLQNDRLFLYYLQNGRDMYTGEELDIDYLSQYDIDHIIPQAFIKDNSIDNRVLTSSKENRGKSDDVPSKDVVRKMKSYWSKLLSAKLITQRKFDNLTKGERGGLTDDDKAGFIKRQLVETRQITKHVARILDERFNTETDENNKKIRQVKIVTLKSNLVSNFRKEFELYKVREINDYHHAHDAYLNAVIGKALLGVYPQLEPEFVYGDYPHFHGHKENKATAKKFFYSNIMNFFKKDDVRTDKNGEIIWKKDEYISNIKKVLSYPQVNIVKKVEEQTGGFFKESILPKGDSDKLIPRKTKKFYWDTKKYGGFDSPIVAYSILVIADIEKGKSKKLKTVKALVGVTIMEKMTFERDPVAFLERKGYRNVQEENIIKLPKYSLFKLENGRKRLLASARELQKGNEIVLPNHLGTLLYHAKNIHKVDEPKHLDYVDKHKDEFKELLDVVSNFSKKYTLAEGNLEKIKELYAQNNGEDLKELASSFINLLTFTAIGAPATFKFFDKNIDRKRYTSTTEILNATLIHQSITGLYETRIDLSKLGGD

SEQ ID NO: 162 - protein, 1345 aa, Streptococcus mutans
MKKPYSIGLDIGTNSVGWAVVTDDYKVPAKKMKVLGNTDKSHIEKNLLGALLFDSGNTAEDRRLKRTARRRYTRRRNRILYLQEIFSEEMGKVDDSFFHRLEDSFLVTEDKRGERHPIFGNLEEEVKYHENFPTIYHLRQYLADNPEKVDLRLVYLALAHIIKFRGHFLIEGKFDTRNNDVQRLFQEFLAVYDNTFENSSLQEQNVQVEEILTDKISKSAKKDRVLKLFPNEKSNGRFAEFLKLIVGNQADFKKHFELEEKAPLQFSKDTYEEELEVLLAQIGDNYAELFLSAKKLYDSILLSGILTVTDVGTKAPLSASMIQRYNEHQMDLAQLKQFIRQKLSDKYNEVFSDVSKDGYAGYIDGKTNQEAFYKYLKGLLNKIEGSGYFLDKIEREDFLRKQRTFDNGSIPHQIHLQEMRAIIRRQAEFYPFLADNQDRIEKLLTFRIPYYVGPLARGKSDFAWLSRKSADKITPWNFDEIVDKESSAEAFINRMTNYDLYLPNQKVLPKHSLLYEKFTVYNELTKVKYKTEQGKTAFFDANMKQEIFDGVFKVYRKVTKDKLMDFLEKEFDEFRIVDLTGLDKENKVFNASYGTYHDLCKILDKDFLDNSKNEKILEDIVLTLTLFEDREMIRKRLENYSDLLTKEQVKKLERRHYTGWGRLSAELIHGIRNKESRKTILDYLIDDGNSNRNFMQLINDDALSFKEEIAKAQVIGETDNLNQVVSDIAGSPAIKKGILQSLKIVDELVKIMGHQPENIVVEMARENQFTNQGRRNSQQRLKGLTDSIKEFGSQILKEHPVENSQLQNDRLFLYYLQNGRDMYTGEELDIDYLSQYDIDHIIPQAFIKDNSIDNRVLTSSKENRGKSDDVPSKDVVRKMKSYWSKLLSAKLITQRKFDNLTKAERGGLTDDDKAGFIKRQLVETRQITKHVARILDERFNTETDENNKKIRQVKIVTLKSNLVSNFRKEFELYKVREINDYHHAHDAYLNAVIGKALLGVYPQLEPEFVYGDYPHFHGHKENKATAKKFFYSNIMNFFKKDDVRTDKNGEIIWKKDEHISNIKKVLSYPQVNIVKKVEEQTGGFSKESILPKGNSDKLIPRKTKKFYWDTKKYGGFDSPIVAYSILVIADIEKSKSKKLKTVKALVGVTIMEKMTFERDPVAFLERKGYRNVQEENIIKLPKYSLFKLENGRKRLLASARELQKGNEIVLPNHLGTLLYHAKNIHKVDEPKHLDYVDKHKDEFKELLDVVSNFSKKYTLAEGNLEKIKELYAQNNGEDLKELASSFINLLTFTAIGAPATFKFFDKNIDRKRYTSTTEILNATLIHQSITGLYETRIDLNKLGGD

SEQ ID NO: 163 - protein, 1336 aa, Streptococcus mutans
MKKPYSIGLDIGTNSVGWAVVTDDYKVPAKKMKVLGNTDKSHIKKNLLGALLFDSGNTAEDRRLKRTARRRYTRRRNRILYLQEIFAEEMSKVDDSFFHRLDESFLTDDDKNFDSHPIFGNKAEEDAYHQKFPTIYHLRKHLADSTEKADLRLVYLALAHMIKFRGHFLIEGELNAENTDVQKLFADFVGVYDRTFDDSHLSEITVDASSILTEKISKSRRLEKLINNYPKEKKNTLFGNLIALSLGLQPNFKTNFKLSEDAKLQFSKDTYEEDLEELLGKIGDDYADLFTLAKNLYDAILLSGILTADDSSTKAPLSASMIKRYAEHHEDLEKLKEFIKANKPELYHDIFKDETKNGYAGYIENGVKQDEFYKYLKNTLSKITGSDYFLDQIEREDFLRKQRTFDNGSIPHQIHLQEMHAILRRQGDYYPFLKENQDRIEKILTFRIPYYVGPLARKNSRFAWAEYHSDEAVTPWNFDQVIDKESSAQAFIEHMTNNDLYLPNEKVLPKHSPLYEKYTVYNELTKIKYVTEIGEAKFFDANLKQEIFDGLFKHERKVTKKKLRTFLDKNFDEFRIVDIQGLDKETETFNASYATYQDLLKVIKDKVFMDNPENAEILENIVLTLTLFEDREMIKQRLAKYADVFDKKVIDQLARRHYTGWGRLSAKLLNGIRDKQSCKTIMDYLIDDAQSNRNLMQLITDDNLTFKDDIVKAQYVDNSDDLHQVVQSLAGSPAIKKGILQSLKIVDELVKVMGKEPEQIVVEMARENQTTAKGRRNSQQRYKRLKEAIKDLNHKILKEHPTDNQALQNNRLFLYYLQNGRDMYTGESLDINRLSDYDIDHVIPQAFIKDNSIDNRVLTSSKANRGKSDDVPSEDVVNRMRPFWNKLLSSGLISQRKYNNLTKKELTLDDKAGFIKRQLVETRQITKHVARMLDERFNKEFDDNNKRIRRVKIVTLKSNLVSSFRKEFELYKVREINDYHHAHDAYLNAVVVKALLVKYPKLEPEFVYGEYLKYNSYRERKATQKMFFYSNIMNMFKSKVKLADDQIVERPMIEVNDETGEIAWDKTKHITTVKKVLSYPQVNIVKKVEEQTGGLFDPKSPLEKLVPLKKALNPEKYGGYQKPTTAYPILLIVDTKQLIPISVMDKKRFEQNPVKFLKDKGYQQIEKNNFVKLPKYTLVDIGNGIKRLWASSKEVHKGNQLVVSKKSQDLLYHAHHLDNDYSNEYVKNHYQQFDILFNEITSFSKKCKLGKEHIQKIEEAYSKERDFASIEELADGFIKLLGFTQLGATSPFSFLGIKLNQKQYTGKKDYLEATLIHQSITGLYETRIDLSKLGGD

SEQ ID NO: 164 - protein, 1345 aa, Streptococcus mutans
MKKPYSIGLDIGTNSVGWAVVTDDYKVPAKKMKVLGNTDKSHIKKNLLGALLFDSGNTAADRRLKRTARRRYTRRRNRILYLQEIFAEEMSKVDDSFFHRLEDSFLVTEDKRGERHPIFGNLEEEVKYHENFPTIYHLRQYLADNPEKVDLRLVYLALAHIIKFRGHFLIEGKFDTRNNDVQRLFQEFLAVYDNTFENSSLQEQNVQVEEILTDKISKSAKKDRVLKLFPNEKSNGRFAEFLKLIVGNQADFKKHFELEEKAPLQFSKDTYEEELEVLLAQIGDNYAELFLSAKKLYDSILLSGILTVTDVSTKAPLSASMIQRYNEHQMDLVQLKQFIRQKLSDKYNEVFSDVSKDGYAGYIDGKTNQEAFYKYLKGLLNKIEGSGYFLDKIEREDFLRKQRTFDNGSIPHQIHLQEMRAIIRRQAEFYPFLADNQDRIEKILTFRIPYYVGPLARGKSDFAWLSRKSADKITPWNFDEIVDKESSAEAFINRMTNYDLYLPNQKVLPKHSLLYEKFTVYNELTKVKYKTEQGKTAFFDANMKQEIFDGVFKVYRKVTKDKLMDFLEKEFDEFRIVDLTGLDKENKAFNASYGTYHDLRKILDKDFLDNSKNEKILEDIVLTLTLFEDREMIRKRLENYSDLLTKEQVKKLERRHYTGWGRLSAELIHGIRNKESRKTILDYLIDDGNSNRNFMQLINDDALSFKEEIAKAQVIGETDNLNQVVSDIAGSPAIKKGILQSLKIVDELVKIMGHQPENIVVEMARENQFTNQGRRNSQQRLKGLTDSIKEFGSQILKEHPVEHSQLQNDRLFLYYLQNGRDMYTGEELDIDYLSQYDIDHIIPQAFIKDNSIDNRVLTSSKENRGKSDDVPSKNVVRKMKSYWSKLLSAKLITQRKFDNLTKAERGGLTDDDKAGFIKRQLVETRQITKHVARILDERFHTETDENNKKIRQVKIVTLKSNLVSNFRKEFELYKVREINDYHHAHDAYLNAVIGKALLGVYPQLEPEFVYGDYPHFHGHKENKATAKKFFYSNIMNFFKKDDVRTDKNGEIIWKKDEHISNIKKVLSYPQVNIVKKVEEQTGGFSKESILPKGNSDKLIPRKTKKFYWDTKKYGGFDSPIVAYSILVIADIEKGKSKKLKTVKALVGVTIMEKMTFERDPVAFLERKGYRNVQEENIIKLPKYSLFKLENGRKRLLASARELQKGNEIVLPNHLGTLLYHAKNIHKVDEPKHLDYVDKHKDEFKELLDVVSNFSKKYTLAEGNLEKIKELYAQNNGEDLKELASSFINLLTFTAIGAPATFKFFDKNIDRKRYTSTTEILNATLIHQSITGLYETRIDLSKLGGD

SEQ ID NO: 165 - protein, 1345 aa, Streptococcus mutans
MKKPYSIGLDIGTNSVGWAVVTDDYKVPAKKMKVLGNTDKSHIKKNLLGALLFDSGNTAEDRRLKRTTRRRYTRRRNRILYLQEIFSEEMGKVDDSFFHRLEDSFLVTEDKRGERHPIFGNLEEEVKYHENFPTIYHLRQYLADNPEKTDLRLVYLALAHIIKFRGHFLIEGKFDTRNNDVQRLFQEFLAVYDNTFENSSLQEQNVQVEEILTDKISKSAKKDRVLKLFPNEKSNGRFAEFLKLIVGNQADFKKHFELEEKAPLQFSKDTYEEELEVLLAQIGDNYAELFLSAKKLYDSILLSGILTVTDVSTKAPLSASMIQRYNEHQMDLTQLKQFIRQKLSDKYNEVFSDVSKDGYAGYIDGKTNQEAFYKYLKGLLNKIEGSGYFLDKIEREDFLRKQRTFDNGSIPHQIHLQEMRAIIRRQAEFYPFLADNQDRIEKLLTFRIPYYVGPLASGKSDFAWLSRKSADKITPWNFDEIVDKESSAEAFINRMTNYDLYLPNQKVLPKHSLLYEKFTVYNELTKVKYKTEQGKTAFFDANMKQEIFDGVFKVYRKVTKDKLMDFLEKEFDEFRIVDLTGLDKENKVFNASYGTYHDLCKILDKDFLDNSKNEKILEDIVLTLTLFEDREMIRKRLENYSDLLTKEQVKKLERRHYTGWGRLSAELIHGIRNKESRKTILDYLIDDGNSNRNFMQLINDDALSFKEEIAKAQVIGETDNLNQVVSDIAGSPAIKKGILQSLKIVDELVKIMGHQPENIVVEMARENQFTNQGRRNSQQRLKGLTDSIKEFGSQILKEHPVENSQLQNDRLFLYYLQNGRDMYTGEELDIDYLSQYDIDHIIPQAFIKDNSIDNRVLTSSKENRGKSDDVPSKDVVRKMKSYWSKLLSAKLITQRKFDNLTKAERGGLTDDDKAGFIKRQLVETRQITKHVARILDERFNTETDENNKKIRQVKIVTLKSNLVSNFRKEFELYKVREINDYHHAHDAYLNAVIGKALLGVYPQLEPEFVYGDYPHFHGHKENKATAKKFFYSNIMNFFKKDDVRTDKNGEIIWKKDEHISNIKKVLSYPQVNIVKKVEEQTGGFSKESILPKGNSDKLIPRKTKKFYWDTKKYGGFDSPIVAYSILVIADIEKGKSKKLKTVKALVGVTIMEKMTFERDPVAFLERKGYRNVQEENIIKLPKYSLFKLENGRKRLLASARELQKGNEIVLPNHLGTLLYHAKNIHKVDEPKHLDYVDKHKDEFKELLDVVSNFSKKYTLAEGNLEKIKELYAQNNGEDLKELASSFINLLTFTAIGAPATFKFFDKNIDRKRYTSTTEILNATLIHQSITGLYETRIDLSKLGGD

SEQ ID NO: 166 - protein, 1336 aa, Streptococcus mutans
MKKPYSIGLDIGTNSVGWAVVTDDYKVPAKKMKVLGNTDKSHIKKNLLGALLFDSGNTAADRRLKRTARRRYTRRRNRILYLQEIFAEEMNKVDDSFFHRLDESFLTDDDKNFDSHPIFGNKAEEDAYHQKFPTIYHLRKHLADSTEKADLRLVYLALAHMIKFRGHFLIEGELNAENTDVQKLFADFVGVYDRTFDDSHLSEITVDASSILTEKISKSRRLEKLINNYPKEKKNTLFGNLIALSLGLQPNFKTNFKLSEDAKLQFSKDTYEEDLEELLGKIGDDYADLFTLAKNLYDAILLSGILTADDSSTKAPLSASMIKRYAEHHEDLEKLKEFIKANKPELYHDIFKDETKNGYAGYIENGVKQDEFYKYLKNTLSKIAGSDYFLDKIEREDFLRKQRTFDNGSIPHQIHLQEMHAILRRQGDYYPFLKENQDRIEKILTFRIPYYVGPLARKNSRFAWAEYHSDEAVTPWNFDQVIDKESSAQAFIEHMTNNDLYLPNEKVLPKHSPLYEKYTVYNELTKIKYVTEIGEAKFFDANLKQEIFDGLFKHERKVTKKKLRTFLDKNFDEFRIVDIQGLDKETETFNASYATYQDLLKVIKDKVFMDNPENAEILENIVLTLTLFEDREMIKQRLAKYADVFDKKVIDQLARRHYTGWGRLSAKLLNGIRDKQSCKTIMDYLIDDAQSNRNLMQLITDDNLTFKDDIVKAQYVDNSDDLHQVVQSLAGSPAIKKGILQSLKIVDELVKVMGKEPEQIVVEMARENQTTAKGRRNSQQRYKRLKEAIKDLNHKILKEHPTDNQALQNNRLFLYYLQNGRDMYTGESLDINRLSDYDIDHVIPQAFIKDNSIDNRVLTSSKANRGKSDDVPSEDVVNRMRPFWNKLLSSGLISQRKYNNLTKKELTLDDKAGFIKRQLVETRQITKHVARMLDERFNKEFDDNNKRIRRVKIVTLKSNLVSSFRKEFELYKVREINDYHHAHDAYLNAVVVKALLVKYPKLEPEFVYGEYPKYNSYRERKATQKMFFYSNIMNMFKSKVKLADDQIVERPMIEVNDETGEIAWDKTKHITTVKKVLSYPQVNIVKKVEEQTGGLFDPKSPLEKLVPLKKALNPEKYGGYQKPTTAYPILLIVDTKQLIPISVMDKKRFEQNPVKFLKDKGYQQIEKNNFVKLPKYTLVDIGNGIKRLWASSKEVHKGNQLVVSKKSQDLLYHAHHLDNDYSNEYVKNHYQQFDILFNEITSFSKKCKLGKEHIQKIEEAYSKERDSASIEELADGFIKLLGFTQLGATSPFSFLGIKLNQKQYTGKKDYLEATLIHQSITGLYETRIDLSKLGGD

SEQ ID NO: 167 - protein, 1345 aa, Streptococcus mutans
MKKPYSIGLDIGTNSVGWAVVTDDYKVPAKKMKVLGNTDKSHIKKNLLGALLFDSGNTAADRRLKRTARRRYTRRRNRILYLQEIFAEEMSKVDDSFFHRLEDSFLVTEDKRGERHPIFGNLEEEVKYYENFPTIYHLRQYLADNPEKVDLRLVYLALAHIIKFRGHFLIEGKFDTRNNDVQRLFQEFLAVYDNTFENSSLQEQNVQVEEILTDKISKSAKKDRVLKLFPNEKSNGRFAEFLKLIVGNQADFKKHFELEEKAPLQFSKDTYEEDLEELLGKIGDDYADLFTLAKNLYDAILLSGILTADDSSTKAPLSASMIQRYNEHQMDLAQLKQFIRQKLSDKYNEVFSDVSKDGYAGYIDGKTNQEAFYKYLKGLLNKIEGSGYFLDKIEREDFLRKQRTFDNGSIPHQIHLQEMRAIIRRQAEFYPFLADNQDRIEKILTFRIPYYVGPLARGKSDFAWLSRKSADKITPWNFDEIVDKESSAEAFINRMTNYDLYLPNQKVLPKHSLLYEKFTVYNELTKVKYKTEQGKTAFFDANMKQEIFDGVFKVYRKVTKDKLMDFLEKEFDEFRIVDLTGLDKENKVFNASYGTYHDLCKILDKDFLDNSKNEKILEDIVLTLTLFEDREMIRKRLENYSDLLTKEQVKKLERRHYTGWGRLSAELIHGIRNKESRKTILDYLIDDGNSNRNFMQLINDDALSFKEEIAKAQVIGETDNLNQVVSDIAGSPAIKKGILQSLKIVDELVKIMGHQPENIVVEMARENQFTNQGRRNSQQRLKGLTDSIKEFGSQILKEHPVENSQLQNDRLFLYYLQNGRDMYTGEELDIDYLSQYDIDHIIPQAFIKDNSIDNRVLTSSKENRGKSDDVPSKDVVRKMKPYWSKLLSAKLITQRKFDNLTKAERGGLTDDDKAGFIKRQLVETRQITKHVARILDERFNTETDENNKKIRQVKIVTLKSNLVSNFRKEFELYKVREINDYHHAHDAYLNAVIGKALLGVYPQLEPEFVYGDYPHFHGHEENKATAKKFFYSNIMNFFKKDDVRTDKNGEIIWKKDEHISNIKKVLSYPQVNIVKKVEEQTGGFSKESILPKGNSDKLIPRKTKKFYWDTKKYGGFDSPIVAYSILVIADIEKGKSKKLKTVKALVGVTIMEKMTFERDPVAFLERKGYRNVQEENIIKLPKYSLFKLENGRKRLLASARELQKGNEIVLPNHLGTLLYHAKNIHKVDEPKHLDYVDKHKDEFKELLDVVSNFSKKYTLAEGNLEKIKELYAQNNGEDLKELASSFINLLTFTAIGAPATFKFFDKNIDRKRYTSTTEILNATLIHQSITGLYETRIDLSKLGGD

SEQ ID NO: 168 - protein, 1345 aa, Streptococcus mutans
MKKPYSIGLDIGTNSVGWAVVTDDYKVPAKKMKVLGNTDKSHIKKNLLGALLFDSGNTAEDRRLKRTTRRRYTRRRNRILYLQEIFSEEMGKVDDSFFHRLEDSFLVTEDKRGERHPIFGNLEEEVKYHENFPTIYHLRQYLADNPEKTDLRLVYLALAHIIKFRGHFLIEGKFDTRNNDVQRLFQEFLAVYDNTFENSSLQEQNVQVEEILTDKISKSAKKDRVLKLFPNEKSNGRFAEFLKLIVGNQADFKKHFELEEKAPLQFSKDTYEEELEVLLAQIGDNYAELFLSAKKLYDSILLSGILTVTDVSTKAPLSASMIQRYNEHQMDLTQLKQFIRQKLSDKYNEVFSDVSKDGYAGYIDGKTNQEAFYKYLKGLLNKIEGSGYFLDKIEREDFLRKQRTFDNGSIPHQIHLQEMRAIIRRQAEFYPFLADNQDRIEKLLTFRIPYYVGPLASGKSDFAWLSRKSADKITPWNFDEIVDKESSAEAFINRMTNYDLYLPNQKVLPKHSLLYEKFTVYNELTKVKYKTEQGKTAFFDANMKQEIFDGVFKVYRKVTKDKLMDFLEKEFDEFRIVDLTGLDKENKVFNASYGTYHDLCKILDKDFLDNSKNEKILEDIVLTLTLFEDREMIRKRLENYSDLLTKEQVKKLERRHYTGWGRLSAELIHGIRNKESRKTILDYLIDDGNSNRNFMQLINDDALSFKEEIAKAQVIGETDNLNQVVSDIAGSPAIKKGILQSLKIVDELVKIMGHQPENIVVEMARENQFTNQGRRNSQQRLKGLTDSIKEFGSQILKEHPVENSQLQNDRLFLYYLQNGRDMYTGEELDIDYLSQYDIDHIIPQAFIKDNSIDNRVLTSSKENRGKSDDVPSKDVVRKMKSYWSKLLSAKLITQRKFDNLTKAERGGLTDDDKAGFIKRQLVETRQITKHVARILDERFNTETDENNKKIRQVKIVTLKSNLVSNFRKEFELYKVREINDYHHAHDAYLNAVIGKALLGVYPQLEPEFVYGDYPHFHGHKENKATAKKFFYSNIMNFFKKDDVRTDKNGEIIWKKDEHISNIKKVLSYPQVNIVKKVEEQTGGFSKESILPKGNSDKLIPRKTKKFYWDTKKYGGFDSPIVAYSILVIADIEKGKSKKLKTVKALVGVTIMEKMTFERDPVAFLERKGYRNVQEENIIKLPKYSLFKLENGRKRLLASARELQKGNEIVLPNHLGTLLYHAKNIHKVDEPKHLDYVDKHKDEFKELLDVVSNFSKKYTLAEGNLEKIKELYAQNNGEDLKELASSFINLLTFTAIGAPATFKFFDKNIDRKRYTSTTEILKATLIHQSITGLYETRIDLSKLGGD

SEQ ID NO: 169 - protein, 1338 aa, Streptococcus mutans
MDLIGTNSVGWAVVTDDYKVPAKKMKVLGNTDKSHIKKNLLGALLFDSGNTAADRRLKRTARRRYTRRRNRILYLQEIFAEEMSKVDDSFFHRLEDSFLVTEDKRGERHPIFGNLEEEVKYHENFPTIYHLRQYLADNPEKVDLRLVYLALAHIIKFRGHFLIEGKFDTRNNDVQRLFQEFLAVYDNTFENSSLQEQNVQVEEILTDKISKSAKKDRVLKLFPNEKSNGRFAEFLKLIVGNQADFKKHFELEEKAPLQFSKDTYEEELEVLLAQIGDNYAELFLSAKKLYDSILLSGILTVTDVSTKAPLSASMIQRYNEHQMDLAQLKQFIRQKLSDKYNEVFSDVSKDGYAGYIDGKTNQEAFYKYLKGLLNKIEGSGYFLDKIEREDFLRKQRTFDNGSIPHQIHLQEMRAIIRRQAEFYPFLADNQDRIEKILTFRIPYYVGPLARGKSDFAWLSRKSADKITPWNFDEIVDKESSAEAFINRMTNYDLYLPNQKVLPKHSLLYEKFTVYNELTKVKYKTEQGKTAFFDANMKQEIFDGVFKVYRKVTKDKLMDFLEKEFDEFRIVDLTGLDKENKAFNASYGTYHDLRKILDKDFLDNSKNEKILEDIVLTLTLFEDREMIRKRLENYSDLLTKEQVKKLERRHYTGWGRLSAELIHGIRNKESRKTILDYLIDDGNSNRNFMQLINDDALSFKEEIAKAQVIGETDNLNQVVSDIAGSPAIKKGILQSLKIVDELVKIMGHQPENIVVEMARENQFTNQGRRNSQQRLKGLTDSIKEFGSQILKEHPVEHSQLQNDRLFLYYLQNGRDMYTGEELDIDYLSQYDIDHIIPQAFIKDNSIDNRVLTSSKENRGKSDDVPSKNVVRKMKSYWSKLLSAKLITQRKFDNLTKAERGGLTDDDKAGFIKRQLVETRQITKHVARILDERFHTETDENNKKIRQVKIVTLKSNLVSNFRKEFELYKVREINDYHHAHDAYLNAVIGKALLGVYPQLEPEFVYGDYPHFHGHKENKATAKKFFYSNIMNFFKKDDVRTDKNGEIIWKKDEHISNIKKVLSYPQVNIVKKVEEQTGGFSKESILPKGNSDKLIPRKTKKFYWDTKKYGGFDSPIVAYSILVIADIEKGKSKKLKTVKALVGVTIMEKMTFERDPVAFLERKGYRNVQEENIIKLPKYSLFKLENGRKRLLASARELQKGNEIVLPNHLGTLLYHAKNIHKVDEPKHLDYVDKHKDEFKELLDVVSNFSKKYTLAEGNLEKIKELYAQNNGEDLKELASSFINLLTFTAIGAPATFKFFDKNIDRKRYTSTTEILNATLIHQSITGLYETRIDLSKLGGD

SEQ ID NO: 170 - protein, 1362 aa, Streptococcus oralis
ENKNYSIGLDIGTNSVGWAVITDDYKVPSKKMKVLGNTDKRFIKKNLIGALLFDEGTTAEARRLKRTARRRYTRRKNRLRYLQEIFAEEMSKVDSSFFHRLDDSFLIPEDKKGSKYPIFATLIEEKEYHKQFPTIYHLRKQLADSKEKTDLRLIYLALAHMIKYRGHFLYEDTFDIKNNDIQKIFNEFISIYNNTFEGNSLSGQNVQVEAIFTDKISKSAKRERVLKLFPDEKSTGLFSEFLKLIVGNQADFKKHFDLEEKAPLQFSRDTYDEDLENLLGQIGDDFADLFVAAKKLYDAILLSGILTVTDPSTKAPLSASMIERYENHQKDLATLKQFIKTNLPEKYDEVFSDQSKDGYAGYIDGKTTQESFYKYIKNLLSKFEGADYFLEKIEREDFLRKQRTFDNGSIPHQIHLQEMNAILRRQGEHYPFLKENKEKIEKILTFRIPYYVGPLARGNRDFAWLTRNSDQAIRPWNFEEIVDKASSAESFINKMTNYDLYLPEEKVLPKHSLLYETFAVYNELTKVKFIAEGLRDYQFLDSRQKKDIFYTLFKAEDKRKVTEKDIIQYLHTVDGYDGIELKGIEKQFNASLSTYHDLLKIIKDKEFMDDPNNEEILENIVHTLTIFEDREMIKQRLAQYDSLFDEKVIKALTRRHYTGWGKLSSKLINGIRDKQTGKTILDYLMDDGYNNRNFMQLINDDELSFKEIIKKAQVVGKTDDVKQVVQELPGSPAIKKGILQSIKLVDELVKVMGHEPESIVIEMARENQTTARGKKNSQQRYKRIEDSLKILASKILKEHPTDNIQLQNDRLFLYYLQNGRDMYTGKPLDINQLSSYDIDHIVPQAFIKDDSLDNRVLTSLKDNRGKSDNVPSLEVVEKMKTFWQQLLDSKLISYRKFNNLTKAERGGLDERDKVGFIKRQLVETRQITKHVAQILDARYNTEVNEKDKKNRTVKIITLKSNLVSNFRKEFRLYKIREINDYHHAHDAYLNAVVAKAILKKYPKLEPEFVYGDYQKYDLSKDPKEIEKATEKYFFYSNLLNFFKEEVHYADGTIVKRENIEYSKDTGEIAWNKEKDFATIKKVLSLPQVNIVKKREVQTGGFSKESILPKGNSDKLIPRKTKDILWDTTKYGGFDSPVIAYSILLIADIEKGKAKRLKTVKTLVGITIMEKATFEKSPIAFLENKGYHNVRKENILCLPKYSLFELKNGRRRMLASAKELQKGNEIVLPVHLTTLLYHAKNIHRLDEPEHLEYIQKHRNEFKGLLNLVSEFSQKYVLADANLEKIKNLYADNEQADIEILANSFINLLTFTALGAPAAFKFFGKDVDRKRYTTVSEILNATLIHQSITGLYETRIDLSKLGED

SEQ ID NO: 171 - protein, 1360 aa, Streptococcus oralis
ENKNYSIGLDIGTNSVGWSVITDDYKVPSKKMKVLGNTDKRFIKKNLIGALLFDEGTTAEARRLKRTARRRYTRRKNRLRYLQEIFAEEMSKVDSSFFHRLDDSFLIPEDKRGSKYPIFATLAEEKEYHKQFPTIYHLRKQLADSKEKTDLRLIYLALAHMIKYRGHFLYEDTFDIKNNDIQKIFSEFISIYDNTFEGSSLSGQNAQVEAIFTDKISKSAKRERVLKLFPDEKSTGLFSEFLKLIVGNQADFKKHFDLGEKAPLQFSKDTYDEDLENLLGQIGDDFADLFLVAKKLYDAILLSGILTVTDPSTKAPLSASMIERYENHQKDLAVLKQFIKNNLPEKYDEVFSDQSKDGYAGYIDGKTTQEAFYKYIKNLLSKFEGTDYFLEKIEREDFLRKQRTFDNGSIPHQIHLQEMNAILRRQGEHYPFLKDNKEKIEKILTFRIPYYVGPLARGNRDFAWLTRNSDEAIRPWNFEEIVDKASSAEDFINKMTNYDLYLPEEKVLPKHSLLYETFAVYNELTKVKFIAEGLRDYQFLDSGQKKQIVTQLFKEKRKVTEKDIIQFLHNVDGYDGIELKGIEKQFNASLSTYHDLLKIIKDKEFMDDSKNEEILENIVHTLTIFEDREMIKQRLAQYDSLFDEKVIKALIRRHYTGWGKLSAKLIDGICDKQTGNTILDYLIDDGKNNRNFMQLINDDGLSFKEITQKAQVVGKTDDVKQVVQELPGSPAIKKGILQSIKIVDELVKVMGHTPESIVIEMARENQTTARGKKNSQQRYKRIEDALKNLASNILKEHPTNNIQLQNDRLFLYYLQNGRDMYTGKPLDINQLSSYDIDHIVPQAFIKDDSLDNRVLTSLKDNRGKSDNVPSIEVVQKRKAFWQQLLDSKLISERKFNNLTKAERGGLDERDKVGFIKRQLVETRQITKHVAQILDARFNKEVNEKDKKNRTVKIITLKSNLVSNFRKEFRLYKVREINDYHHAHDAYLNAVVAKAILKKYPKLEPEFVYGDYQKYDLSRNPKEVEKATEKYFFYSNLLNFFKEEVHYADGTIVKRENIEYSKDTGEIAWNKEKDFATIKKVLSYPQVNIVKKREVQTGGFSKESILPKGNSDKLIPRKTKDILWETTKYGGFDSPVIAYSILLIADIEKGKAKKLKTVKTLVGITIMEKAAFEENPITFLENKGYHNVRKENILCLPKYSLFELENGRRRLLASAKELQKGNEIVLPVYLTTLLYHSKNVHKLDEPEHLEYIQKHRNEFKDLLNLVSEFSQKYVLADANLEKIQNLYADNEQADIEILANSFINLLTFTALGAPAAFKFFGKDIDRKRYTTVSEILNATLIHQSITGLYETRIDLSKLGED

SEQ ID NO: 172 - protein, 1358 aa, Streptococcus parasanguinis
KKPYSIGLDIGTNSVGWAVITDDYKVPAKKMKVLGNTNKESIKKNLIGALLFDAGNTAADRRLKRTARRRYTRRRNRILYLQEIFAAEMNKVDESFFHRLDDSFLVPEDKRGSKYPIFGTLEEEKEYHKQFPTIYYLRKILADSKEKVDLRLIYLALAHIIKYRGHFLYEDSFDIKNNDIQKIFNEFTILYDNTFEESSLSKGNAQVEEIFTDKISKSAKRDRVLKLFPDEKSTGLFSEFLKLIVGNQADFKKHFDLEEKAPLQFSKDTYEEDLESLLGQIGDVYADLFVVAKKLYDAILLAGILSVKDPGTKAPLSASMIERYDNHQNDLSALKQFVRRNLPEKYAEVFSDDSKDGYAGYIDGKTTQEGFYKYIKNLISKIEGAEYFLEKIEREDFLRKQRTFDNGSIPHQIHLQEMNAILRHQGEYYPFLKENKDKIEQILTFRIPYYVGPLARGNSDFAWLSRNSDEAIRPWNFEEMVDKSSSAEDFIHRMTNYDLYLPEEKVLPKHSLLYETFTVYNELTKVKYIAEGMKDYQFLDSGQKKQIVNQLFKEKRKVTEKDIIHYLHNVDGYDGIELKGIEKHFNSSLSTYHDLLKIIKDKEFMDDPKNEEIFENIVHTLTIFEDRVMIKQRLNQYDSIFDEKVIKALTRRHYTGWGKLSAKLINGIRDKKTSKTILDYLIDDGYSNRNFMQLINDDGLSFKETIQKAQVVGETNDVKQVVQELPGSPAIKKGILQSIKIVDELVKVMGHAPESVVIEMARENQTTNKGKSKSQQRLKTLSDAISELGNILKEHPTDNIQLQNDRLFLYYLQNGKDMYTGEALDINQLSNYDIDHIIPQAFIKDDSLDNRVLTSSKDNRGKSDNVPSLEIVEKMKGFWQQLLDSKLISERKFNNLTKAERGGLDERDKVGFIKRQLVETRQITKHVAQILDDRFNAEVNEKNQKLRSVKIITLKSNLVSNFRKEFGLYKVREINDYHHAHDAYLNAVVAKAILKKYPKLEPEFVYGDYQKYDLTKDPKEIEKATEKYFFYSNLLNFFKDKVYYADGTIIQRGNVEYSKDTGEIAWNKKRDFAIVRKVLSYPQVNIVKKTEEQTGGFSKESILPKGNSDKLIPRKTKNVQLDTTKYGGFDSPVIAYSILLVADVEKGKSKKLKTVKSLIGITIMEKVKFEANPVAFLEGKGYQNVVEENIIRLPKYSLFELENGRRRMLASAKELQKGNEMVLPSYLIALLYHAKRIQKKDEPEHLEYIKQHHSEFNDLLNFVSEFSQKYVLAESNLEKIKNLYIDNEQTNMEEIANSFINLLTFTAFGAPAVFKFFGKDIERKRYSTVTEILKATLIHQSLTGLYETRIDLSKLGEE

SEQ ID NO: 173 - protein, 1327 aa, Streptococcus parauberis
MKVLGNTDRQTVKKNMIGTLLFDSGETAEARRLKRTARRRYTRRINRIKYLQSIFDDEMSKIDSAFFQRIKDSFLVPDDKNDDRHPIFGNIKDEVDYHKNYPTIYHLRKKLADSDEKADLRLIYLALAHIIKFRGHFLIEGDLDSQNTDVNALFLKLVDTYNLMFEDDIDTQTIDATVILTEKMSKSRRLENLIAKIPNQKKNTLFGNLISLSLGLTPNFKANFELSEDAKLQISKESFEEDLDNLLAQIGDQYADLFIAAKNLSDAILLSDILTVKGVNTKAPLSASMVQRFNEHQDDLKLLKKLVKVQLPEKYKEIFDIKDKNGYAGYINGKTSQEDFYKYIKPILSKLKGAESLISKLEREDFLRKQRTFDNGSIPHQIHLNELKSIIRRQEKYYPFLKDKQVRIEKIFTFRIPYFVGPLANGNSSFAWVKRRSNESITPWNFEEVVEQEASAKVFIERMTNFDTYLPEEKVLPKHSLLYEMFTVYNELTKVKYQAEGMRKPEFLSSEEKIEIVSNLFKTERKVTVKQLKENYFNKIRCLDSITISGVEDKFNASLGTYHDLLNIIKNQKILDDEQNQDSLEDIVLTLTLFEDEKMIAKRLSKYESIFDPSILKKLKKRHYTGWGRLSQKLINGIRDKQTGKTILDFLIDGQANRNFMQLINDPSLDFASIIKEAQEKTIKSEKLEETIANLAGSPAIKKGILQSVKIVDEVVKVMGYEPSNIVIEMARENQSTQRGINNSRERLRKLEEVHKNIGSKILKEHEISNAQLQSDRVYLYLLQDGKDMYTGKDLDFDRLSQYDIDHIIPQSFIKDNSIDNIVLTSQESNRGKSDNVPYIAIVNKMKSYWQHQLKSGAISQRKFDNLTKAERGGLSEYDKAGFIKRQLVETRQITKHVAQILNNRFNNNVDDSSKNKRPVKIITLKSKMVSDFRKEFGFYKIREVNDYHHAHDAYLNAVVGTALLKKYPKLEAEFVYGDYKHYDLSDTSLGKATAKMFFYSNIMNFFKKEVRLADGTVITRPQIETNTETGEIVWDKVKDIKTIRKVLSIPQINVVKKTEVQTGGFSKESILSKRDSDKLIPRKNNWDPKKYGGFGSPIIAYSVLVVAKVTKGKSQKTKSVKELVGITIMEQNEFEKDRITFLEKKGYQDIQESLIIKLPKFSLFELENGRKRLLASELQKGNELSLPNKYIQFLYLASRYTSFSGKEEDREKHRHFVESHLHYFDEIKDIIADFSRRYILADANLEKILTLYNEKNQFSIEEQATNMLNLFTFTGLGAPATLKFFNVDIDRKRYTSSTEILNSTLIRQSITGLYETRIDLSKIGGD

SEQ ID NO: 174 - protein, 1355 aa, Streptococcus phocae
KKSYSIGLDIGTNSVGWAVITDDYKVPAKKMKVLGNTSRQSIKKNMIGALLFDEGGPAASTRVKRTTRRRYTRRKNRLCYLRDIFESEMHTIDKHFFLRLEDSFLHKSDKRYEAHPIFGTLQEEKAYHDNYPTIYHLRKALADNTEKADLRLIYLALAHIIKFRGHFLIEGALSANNTDVQQLVHALVDAYNIMFEEDLDIEAIDVKAILTEKISKTRRLENLISNIPGQKKNGLFGNLIALSLGLTPNFKSHFNLPEDAKLQLAKDTYDEELNNLLTQIGDEYADLFLSAKNLSDAILLSDILTVNGDGTQAPLSASLIKRYEEHRQDLALLKQMFKEQLPDLYRDVFTDENKDGYAGYISGKTSQEAFYKYIKPILETLDGAEDFLTKINREDFLRKQRTFDNGSIPHQIHLGELQAILERQQAYYPFLKDNQEKIEKILTFRIPYYIGPLARGNSRFAWLTRTSDQKITPWNFDEMVDQEASAQAFIERMTNFDEYLPQEKVLPKHSLTYEYFTVYNELTKVKYVTEGMTKPEFLSAGQKEQIVELLFKKYRKVTVKQLKEDFFSKIECFDTVDISGVEDKFNASLGTYHDLLKIIKDKAFLDNSENENIIEDIILTLTLFEDKEMIANRLAVYEDLFDQNVLKQLKRRHYTGWGRLSKQLINGMRDKHTGKTILDFLKDGFINRNFMQLINDDNLSFKEEIKKAQEGGLKDSINDQIRDLAGSPAIKKGILQTINIVDEIVKIMGKAPQHIVVEMARDVQKTDIGVKQSRERMKRVQEVLKKLGSQLLKEHPVENFQLQNERLYLYYLQNGKDMYTGEELSISNLSHYDIDHIIPRSFIKDDSIDNKVLTRSEHNRGKTDNVPSIEVVKRMKPYWQKLLDTKVISQRKFDNLTKAERGGLQESDKANFIQRQLVETRQITKHVAQILDSRFNTERDEKDRPIRRVKVITLKSKFVSDFRQDFGFYKLREINDYHHAHDAYLNAVVGTALLKMYPKLASEFVYGDYQKYDLSGKASGHATAKYFFYSNLMNFFKSEVKLANGNIIKRSPIEVNEETGEIVWDKTKDFGTVRKVLSAPQVNIVKKTEIQTGGFSNETILSKGKSSKLIPRKNKWRDTTKYGGFNTPTVAYSVLVVAKVEKGKAKKLKPVKELVGITIMERTKFEANPIAFLESKGYHDIQEHLMITLPKYSLFELENGRRRLLASELQKGNEMVLPQHLVTFLYRVSKRDKGTQSENMEYISNHKEKFIEIFHYIIRYAEKNVIKPKVIERLNDTFNQKFNDSDLTELSISFLNLFKFTSFGAPEKFTFLNSEIKQDDVRYRSTKECLNSTLIHQSVTGLYETRIDLSQFGGD

SEQ ID NO: 175 - protein, 1361 aa, Streptococcus pseudopneumoniae
SNKPYSIGLDIGTNSVGWAVITDDYKVPSKKMKVLGNTDKHFIKKNLIGALLFDEGTTAEDRRLKRTARRRYTRRKNRLRYLQEIFSEEISKVDNSFFHRLDDSFLVPEDKRGSKYPIFATLTEEKEYYKQFPTIYHLRKQLADSKEKADLRLIYLTLAHMIKYRGHFLYEESFDIKNNDIQKIFNEFISIYDNTFEGSSLSGQNAQVEAIFTDKISKSTKRERVLKLFPDQKSTGLFSEFLKLIVGNQADFKKHFDLEEKAPLQFSKDTYDEDLENLLGQIGDDFADLFLVAKKLYDAILLSGILTVTDPSTKAPLSASMIERYENHQKDLAALKQFIKNNLPEKYDEVFSDQSKEGYAGYIDSKTTQEAFYKYIKNLLSKIDGADYLLDKIEREDFLRKQRTFDNGSIPHQIHLQEMNAILRRQGEHYPFLKENREKIEKILTFRIPYYVGPLARGNRDFAWLTRNSDQAIRPWNFEEIVDKASSAEAFINKMTNYDLYLPEEKVLPKHSLLYETFAVYNELTKVKFIAEGLRDYQFLDSGQKKKIINQLFKEKRKVTEKDLIHYLHNVDGYDGIELKGIEKQFNASLSTYHDLLKIIKDKRFMDEPKNQEILENIVHTLTIFEDREMIKQRLAQYASIFDEKVIKTLTRRHYTGWGKLSAKLINCIRDRKTGKTILDYLIDDGYNNRNFMQLINDDGLSFKEIIQESQVVGKPDDVKQIVQELPGSSAIKKGILQSIKLVDELVKVMGHDPESIVIEMARENQTTARGKKNSQQRYKRIEDSLKILASNILKEHPTDNIQLQNDRLFLYYLQNGKDMYTGNPLDINHLSSYDIDHIIPQAFIKDDSLDNRVLTSSKDNRGKSDNVPSLEVVQKRKAFWQQLLESKLISERKFNNLTKAERGGLNERDKVGFIKRQLVETRQITKHVAQILDSRFNTKVNEKNQKIRTVKIITLKSNLVSNFRKEFRLYKVREINDYHHAHDAYLNAVVAKAILKKYPKLEPEFVYGDYQKYDLSRDPKEIEKATEKYFFYSNLLNFFKEEVHYADGTIVKRENIEYSKDTGEIAWNKEIDFATIRKILSLSQVNIVKKTEEQTGGLFDNNIVSKKKVVDASKLIPIKSGLSPEKYGGYARPTIAYSVLVIADIEKGKAKKLKRIKEMVGITIQDKKKFEANPTAYLEEYGYKNINPNLIIKLPKYSLFKFNDGQRRLLASSIELQKGNELILPYHFTTLLYHAQRINKISEPIHKQYVETHQSEFEELLTTIISLSKKYIQKPIVESLLQQAFEQADKDIYQLSESFISLLKLTSFGAPGAFRFLGVEISQSNVRYQSVSSCFNATLIHQSITGLYETRIDLSKLGED

SEQ ID NO: 176 - protein, 1361 aa, Streptococcus pseudopneumoniae
SNKPYSIGLDIGTNSVGWVIITDDYKVPSKKMKVLGNTDKHFIKKNLIGALLFDEGTTAEDRRLKRTARRRYTRRKNRLRYLQEIFAEEMNKVDSSFFHRLDDSFLVPEDKRGSKYPIFATLAEEKEYHKNFPTIYHLRKQLADSKEKADLRLIYLALAHMIKYRGHFLYEEAFDIKNNDIQKIFNEFINIYDNTFEGSSLSGQNEQVEAIFSDKISKSAKRERVLKLFPDEKSTGLFSEFLKLIVGNQADFKKHFDLEEKAPLQFSKDTYDEDLENLLGQIGDGFADLFLVAKKLYDAILLSGILTVTDPSTKAPLSASMIERYQNHQNDLASLKQFIKNNLPEKYDEVFSDQSKDGYAGYVDGKTTQEAFYKYIKNLLSKFEGADYFLEKIEREDFLRKQRTFDNGSIPHQIHLQEMNAILRRQGEHYPFLKENKEKIEKILTFRIPYYVGPLARGNRDFAWLTRNSDQAIRPWNFEEIVDKASSAEDFINKMTNYDLYLPEEKVLPKHSLLYETFAVYNELTKVKFIAEGLRDYQFLDSGQKKQIVNQLFKEKRKVTEKDIIQYLHNVDGYDGIELKGIEKQFNASLSTYHDLLKIIKDKEFMDDSKNEEILENIVHTLTIFEDREMIKQRLAQYDSIFDEKVIKALTRRHYTGWGKLSAKLINGIRDKQTGKTILDYLIDDGYSNRNFMQLINDDGLSFKEIIQKAQVFGKTNDVKQVVQELPGSPAIKKGILQSIKIVEELVKVMGHEPESIVIEMARENQTTTRGKKNSQQRYKRIENSLKILASKILKEHPTDNNQLQNDRLFLYYLQNGKDMYTGEALDINQLSSCDIDHIIPQAFIKDDSLDNRVLTSSKENRGKSDNVPCLEVVDKMKVFWQQLLDFKLISYRKFNNLTKAERGGLDERDKVGFIRRQLVETRQITKHVAQILDSRFNTEVTEKDKKNRNVKIITLKSNLVSNFRKEFGLYKVREINDYHHAHDAYLNAVVAKAILKKYPKLEPEFVYGDYQKYDLSKDPKDIEKATEKYFFYSNLLNFFKEEVHYADGTIVKRENIEYSKDTGEIAWNKEKDFATIKKILSLPQVNIVKKTEEQTGGLFDNNIVSKKKVVDASKLIPIKSGLSPEKYGGYARPTIAYSVLVIADIEKGKTKKLKRIKEMIGITVQDKKIFESNPIAYLEECGYKNINPNLIIKLPKYSLFEFNGGQRRLLASSIELQKGNELILPYHFTALLYHTQRINKISEPIHKQYVEAHQNEFKELLTTIISLSKKYIQKPNVESLLQQAFEQADKDIYQLSESFISLLKLTSFGAPGAFKFLGVEISQSSVRYKPNSQFLDATLIHQSITGLYETRIDLSKLGED

SEQ ID NO: 177 - protein, 1363 aa, Streptococcus pseudopneumoniae
SNKPYSIGLDIGTNSVGWAVITDDYKVPSKKMTVLGNTDKHFIKKNLIGALLFDEGTTAEDRRLKRTARRRYTRRKNRLRYLQEIFSGEMSKVDSSFFHRLDDSFLVPEDKRGSKYPIFATLVEEKEYHKQFPTIYHLRKQLADSKEKADLRLIYLVLAHMIKYRGHFLYEEAFDIKNNDIQKIFNEFISIYDNTFEGSSLSGQNAQVETIFTDKISKSAKRERVLKLFPDEKSTGLFSEFLKLIVGNQADFKKHFDLGEKAPLQFSKDTYDEDLENLLGQIGDDFADLFLVAKKLYDAILLSGILTVTDPSTKAPLSASMIERYENHQKDLTTLKQFIKNNLPEKYDEVFSDQSKDGYAGYIDGKTTQEAFYKYIKNLLSKFEGTDYFLEKIEREDFLRKQRTFDNGSIPHQIHLQEMNAILRRQGEHYPFLKENKEKIEKILTFRIPYYVGPLARGNRDFAWLTRNSDQAIRPWNFEEIVDKASSAEDFINKMTNYDLYLPEEKVLPKHSLLYETFAVYNELTKVKFIAEGLRDYQFLDSGQKKQIVNQLFKEKRKVTEKDIIHYLHTVDGYDGIELKGIEKQFNASLSTYHDLLKIIKDKEFMDDSKNEAILENIVHTLTIFEDREMIKQRLAQYDSLFDKKVIKALTRRHYTGWGKLSAKLINGICDKQTGNTILDYLIDDGEINRNFMQLINDDGLSFKKIIQKSQVVGETDDVKQVVRELPGSPAIKKGILQSIKIVDELVKVMDHAPESIVIEMARENQTTARGKKNSQQRYKRIEDSLKILASNILKENPTDNNQLQNDRLFLYYLQNGKDMYTGEALDINQLSSYDIDHIIPQAFIKDDSLDNRVLTSSKDNRGKSDNVPSLEVVQKRKAFWQQLLDSKLISERKFNNLTKAERERDGLNELDKVGFIKRQLVETRQITKHVAQILDARFNKEVTEKDKKNRNVKIITLKSNLVSNFRKEFRLYKVREINDYHHAHDAYLNAVVAKAILKKYPKLEPEFVYGDYQKNDLSKDPKDIEKATEKYFFYSNLLNFFKEEVHYADGTIVKRENIEYSKDTGEIAWNKEKDFATIKKVLSYPQVNIVKKTEEQTGGLFDNNIVSKEKVVDASKLIPIKSGLSPEKYGGYARPTIAYSVLVIADIEKGKTKKLKRIKEMVGITIQDKKKFEANPIAYLEECGYKNINPNLIIKLPKYSLFEFNGGQRRLLASSIELQKGNELILPYHFTALLYHAQRINKFSEPIHKQYVEAHQNEFKELLTIIISLSKKYIQKPNVESLLHQAFEQADNDIYQLSESFISLLKLTSFGAPGAFKFLGAEISQSSVRYKPNSQFLDTTLIHQSITGLYETRIDLSKLGED

SEQ ID NO: 178 - protein, 1360 aa, Streptococcus pseudoporcinus
YSYSIGLDIGTNSVGWAVINEDYKVPAKKMTVFGNTDRKTIKKNLLGTVLFDSGETAQARRLKRTNRRRYTRRRYRLCQLQNIFATEMVKVDDTFFQRLSESFFYYQDKAFDKHPIFGNSKEERAYHKTYPTIYHLRKDLADRDQKADLRLIYLALSHIIKFRGHFLIEGKLNSENTDVQKLFIALVTVYNLLFEEEIAGETCDAKALLTAKTSKSKRLESLISEFPGQKKNGLFGNLLALALGLRPNFKSNFGLSEDAKLQITKDTYEEELDNLLAEIGDHYADLFLAAKNLSDAILLSDILTLSDENTRAPLSASMIKRYEEHQEDLALLKKLVKEQMPEKYWEIFSNAKKNGYAGYIEGKVSQEDFYRYIKPILSRLKGGDEFLAKIDRDDFLRKQRTFDNGSIPHQIHLKELHAILRRQEKYYPFLAEQKEKIEQLLCFRIPYYVGPLAKGGNSSFAWLKRRSDEPITPWNFKDVVDEEASAQAFIEGMTNYDTYLPEEKVLPKHSPLYEMFTVYNELTKVKYIAENMTKPLYLSAEQKEAIIDHLFKQTRKVTVKDLKEKYFSQIEGLENVDVTGVEGAFNASLGTYNDLLKIIKDKAFLDDEANAEILEEIVLILTLFQDEKLIEKRLAKYANLFEKSVLKKLRKRHYRGWGRLSRQLIDGMKDKASGKTILDFLKDDFANRNFIQLINDSSLDFEKLIDDAQKKAIKRESLTEAVANLAGSPAIKKGILQSLKVVDEIVKVMGHNPDNIVIEMSRENQTTAQGLKNARQRLKKIKEVHKKTGSRILEDNSERITNLTLQDNRLYLYLLQDGKDMYTGQDLDINNLSQYDIDHIIPQSFIKDNSIDNLVLTTQKANRGKSDNVPSIEVVRDMKDRVWRRQLANGAISRQKFDHLTKAERGGLADSDKARFLRRQLVETRQITKHVAQLLDSRFNSKSNQNKKLARNVKIITLKSKIVSDFRKDFGLYKLREVNNYHHAHDAYLNAVVGTALLKKYPKLEAEFVYGDYKHFDLSDPSLGKATAKVFFYSNIMNFFKEELSLADGTLMKRPVIETNTETGEVVWDKVKDFKTIRKVLSYPQVNIVKKTEIQSGAFSKESVLSKGNSDKLIERKKGWDPKKYGGFDSPNTAYSIFVVAKVAKRKAQKLKTVKEIVGITIMEQAEYEKDNIAFLEKKGYQDIQEKLLIKLPKYSLFELENGRRRLLASEFQKGNELALSGKYMKFLYLASRYDKLSSKIESEQQKKLFVEQHLHYFDEILDIVVKHATCYIKAENNLKKIISLYKKKEAYSINEQALNMLNLFIFTSLGAPSTFVFFDETIDRKRYTTSSDVLNGILIQQSITGLYETRIDLSRFGGD

SEQ ID NO: 179 - protein, 1316 aa, Streptococcus pseudoporcinus
MLGTVLFDSGETAQARRLKRTNRRRYTRRRYRLCQLQNIFATEMVKVDDTFFQRLSESFFYYQDKAFDKHPIFGNSKEERAYHKTYPTIYHLRKDLADRDQKADLRLIYLALSHIIKFRGHFLIEGKLNSENTDVQKLFIALVTVYNLLFEEEIAGETCDAKALLTAKTSKSKRLESLISEFPGQKKNGLFGNLLALALGLRPNFKSNFGLSEDAKLQITKDTYEEELDNLLAEIGDHYADLFLAAKNLSDAILLSDILTLSDENTRAPLSASMIKRYEEHQEDLALLKKLVKEQMPEKYWEIFSNAKKNGYAGYIEGKVSQEDFYRYIKPILSRLKGGDEFLAKIDRDDFLRKQRTFDNGSIPHQIHLKELHAILRRQEKYYPFLAEQKEKIEQLLCFRIPYYVGPLAKGGNSSFAWLKRRSDEPITPWNFKDVVDEEASAQAFIEGMTNYDTYLPEEKVLPKHSPLYEMFTVYNELTKVKYIAENMTKPLYLSAEQKEAIIDHLFKQTRKVTVKDLKEKYFSQIEGLENVDVTGVEGAFNASLGTYNDLLKIIKDKAFLDDEANAEILEEIVLILTLFQDEKLIEKRLAKYANLFEKSVLKKLRKRHYRGWGRLSRQLIDGMKDKASGKTILDFLKDDFANRNFIQLINDSSLDFEKLIDDAQKKAIKRESLTEAVANLAGSPAIKKGILQSLKVVDEIVKVMGHNPDNIVIEMSRENQTTAQGLKNARQRLKKIKEVHKKTGSRILEDNSERITNLTLQDNRLYLYLLQDGKDMYTGQDLDINNLSQYDIDHIIPQSFIKDNSIDNLVLTTQKANRGKSDNVPSIEVVRDMKDRVWRRQLANGAISRQKFDHLTKAERGGLADSDKARFLRRQLVETRQITKHVAQLLDSRFNSKSNQNKKLARNVKIITLKSKIVSDFRKDFGLYKLREVNNYHHAHDAYLNAVVGTALLKKYPKLEAEFVYGDYKHFDLSDPSLGKATAKVFFYSNIMNFFKEELSLADGTLMKRPVIETNTETGEVVWDKVKDFKTIRKVLSYPQVNIVKKTEIQSGAFSKESVLSKGNSDKLIERKKGWDPKKYGGFDSPNTAYSIFVVAKVAKRKAQKLKTVKEIVGITIMEQAEYEKDNIAFLEKKGYQDIQEKLLIKLPKYSLFELENGRRRLLASEFQKGNELALSGKYMKFLYLASRYDKLSSKIESEQQKKLFVEQHLHYFDEILDIVVKHATCYIKAENNLKKIISLYKKKEAYSINEQALNMLNLFIFTSLGAPSTFVFFDETIDRKRYTTSSDVLNGILIQQSITGLYETRIDLSRFGGD

SEQ ID NO: 180 - protein, 1359 aa, Streptococcus sanguinis
KKPYSIGLDIGTNSVGWAVVTDDYKVPAKKMRVFGDTDRSHIKKNLLGTLLFDDGNTAESRRLKRTARRRYTRRRNRILYLQEIFTESMNEIDESFFHRLDDSFLVPEDKRGSKYPIFATLQEEKEYHKQFPTIYHLRKQLADSKEKSDVRLIYLALAHMIKYRGHFLYEETFDIKNNDIQKIFNEFINIYDNTFEGSSLSGQNAQVEAIFTDKISKSAKRERVLKLFPDEKSTGLFSEFLKLIVGNQADFKKHFDLEEKAPLQFSKDTYDEELENLLGQIGDDFADLFLIAKKLYDAILLSGILTVTDPSTKAPLSASMIERYENHQKDLAALKQFIKNNLPEKYVEVFSDQSKDGYAGYIDGKTTQEAFYKYIKNLLSKFEGADYFLDKIEREDFLRKQRTFDNGSIPHQIHLQEMNAILRRQGEHYPFLKENREKIEKILTFRIPYYVGPLARDNRDFSWLTRNSDEPIRPWNFEEVVDKARSAEDFIHRMTNYDLYLPEEKVLPKHSLLYETFAVYNELTKVKFIAEGLRDYQFLDSGQKKQIVNQLFKEKRKVTEKDIIHYLHNVDGYDGIELKGIEKQFNANLSTYHDLLKITKDKEFMDDPKNEEILENIVHTLTIFEDREMIKQRLAQYDTLFDEKVIKALTRRHYTGWGKLSAKLINGIRDKQSGKTILDYLIDDDKINRNFMQLINDDGLSFKEIIQKAQVVGKTDDVKQVVQELPGSPAIKKGILQSIKIVDELVKVMGYALESIVIEMARENQTTARGKKNSQQRYKRIEDALKNLAPNILKENPTDNIQLKNDRLFLYYLQNGKDMYTGKPLDINQLSSYDIDHIIPQAFIKDDSIDNRVLTSSKDNRGKSDNVPSLEVVQKRKAFWQQLLDSKLISERKFNNLTKAERGGLDERDKVGFIRRQLVETQQITKNVAQILDARFNTEVKEKNQKIRTVKIITLKSNLVSNFRKEFGLYKVREINNYHHAHDAYLNAVVAKAILKKYPKLEPEFVYGDYQKYDLFKPSKEIEKATEKYFFYSNLLNFFKEEVLYADGTIRKRENIEYSKDTGEIAWDKEKDFATIKKVLSYPQVNIVKKREVQTGGFSKESILPKGNSDKLIPRKTKDILWDTTKYGGFDSPVIAYSILLIADIEKGKAKKLKTVKTLVGITIMEKAAFEENPITFLENKGYHNVRKENILCLPKYSLFELENGRRRLLASAKELQKGNEIVLPVCLTTLLYHSKNLHKLDEPEHLEYIQKHRNEFKDLLNLVSEFSQKYILAEANLEKIKDLYADNEQADIEILANSFINLLTFTALGAPAAFKFFGKDVDRKRYTTVSEILNATLIHQSITGLYETRIDLSKLGEE

SEQ ID NO: 181 - protein, 1362 aa, Streptococcus sanguinis
KKPYSIGLDIGTNSVGWAVITDDYKVPSKKMKVLGNTDKHFIKKNLIGALLFDEGTTAEDRRLKRTSRRRYTRRKNRLRYLQEIFSEEISKLDSSFFHRLDDSFLVPEDKRGSKYPIFATLEEEKEYHKKFPTIYHLRKHLADSKEKTDLRLIYLALAHMIKYRGHFLYEESFDIKNNDIQKIFNEFISIYDNTFEGSSLSGQNAQVEAIFTDKISKSTKRERVLKLFSDEKSTGLFSEFLKLIVGNQADFKKHFDLEEKAPLQFSKDTYDEDLENLLGQIGDGFADLFLVAKKLYDAILLSGILTVTDPSTKAPLSASMIERYENHQEDLAALKQFIKNNLSEKYAEVFSDQSKDGYAGFIDGKTTQEAFYKYIKNLLSKLEGADYFLNKIEREDFLRKQRTFDNGSIPHQIHLQEMNAILRRQGEHYLFLKENREKIEKILAFRIPYYVGPLARGNRDFAWLTRNSDQAIRPWNFEEVVDKASSAEDFINKMTNYDLYLPEEKVLPKHSLLYETFAVYNELTKVKFIAEGLRDYQFLDSGQKKQIVNQLFKDKRKVTEKDIIHYLHNVDGYDGIELKGIEKQFNASLSTYHDLLKIIKDKEFMDNPKNGEILENIIHTLTIFEDREMIKQRLAQYDTLFDEKVIKALTRRHYTGWGKLSAKLINGIRDKQTGKTILEYLIDDGDCNRNFMQLINDDGLSFKEIIQKAQVVGKTDDVKQVVQEIPGSPAIKKGILQSIKIVDELVKVMGHNPESIVIEMARENQTTAKGKKNSQQRYKRIEDALKNLAPNILKENPTDNIQLQNDRLFLYYLQNGKDMYTGKAIDINQLSNYDIDHIIPQAFIKDDSLDNRVLTSSKDNRGKSDNVPSIEVVQKRKAFWQQLLDSKLISERKFNNLTKAKRGGLDERDKVGFIKRQLVETRQITKHVAQLLDTRFNTEVNEENQKIRTVKIITLKSNLVSNFRKEFGLYKVREINDYHHAHDAYLNAVVAKAILKKYPKLEPEFVYGDYQKYDLSKASNTIDKATEKYFFYSNLLNFFKEKVRYADGTIKKRENIEYSNDTGEIAWNKEKDFATIKKVLSLPQVNIVKKTEEQTGGLFDNNIVSKKKVVDASKLIPIKSSLSPEKYGGYARPTIAYSVLVIADIEKGKGKAKKLKRIKEIVGITIQDKKKFESNPVTYLEECGYKNINSNLIIKLPKYSLFEFNDGQRRLLASSIELQKGNELILPYHLTALLYHAQRINKISEPIHKQYVEAHQNEFKELLTTIISLSKKYIQKPNVELLLQQAFDQADKDIYQLSESFISLLKLTSFGAPGAFKFLGVEISQSSVRYKPNSQFLDTTLIHQSITGLYETRIDLSKLGED

SEQ ID NO: 182 - protein, 1360 aa, unidentified
  source 1..1360: note = Streptococcus sp. F0441
ENKNYSIGLDIGTNSVGWSVITDDYKVPSKKMKVLGNTDKHFIKKNLIGALLFDEGTTAEARRLKRTARRRYTRRKNRLRYLQEIFSEEIGKVDSSFFHRLDDSFLIPEDKRGSKYPIFATLAEEKKYHKQFPTIYHLRKQLADSKEKTDLRLIYLALAHMIKYRGHFLYEEAFDIKNNDIQKIFNEFISIYNNTFEGNSLSGQNVQVEAIFTDKISKSAKRERVLKLFPDEKSTGLFSEFLKLIVGNQADFKKHFDLEEKAPLQFSRDTYDEDLENLLGQIGDDFADLFLVAKKLYDAILLSGILTVTNPSTKAPLSASMIERYENHQKDLASLKQFIKNNLPEKYDEVFSDQSEDGYAGYIDGKTTQETFYKYIKNLLSKFEGADYFLDKIEREDFLRKQRTFDNGSIPHQIHLQEMNAILRRQGEHYPFLKENKEKIEKILTFRIPYYVGPLARGNRDFAWLTRNSDQAIRPWNFEEIVDKASSAEDFINKMTNYDLYLPEEKVLPKHSLLYETFAVYNELTKVKFIAEGLRDYQFLDSGQKKQIVTQLFKEKRKVTEKDIIQFLHNVDGYDGIELKGIEKQFNASLSTYHDLLKIIKDKAFMDDAKNEAILENIVHTLTIFEDREMIKQRLAQYDSLFDEKVIKALTRRHYTGWGKLSAKLINGISDKQTGNTILDYLIDDGEINRNFMQLINDDGLSFKEIIQKAQVVGKTNDVKQVVQELPGSPAIKKGILQSIKIVDELVKVMGHAPESIVIEMARENQTTARGKKNSQQRYKRIEDSLKILASKILKEHPTDNIQLQNDRLFLYYLQNGKDMYTGEALDINQLSSCDIDHIIPQAFIKDDSLDNRVLTSSKDNRGKSDNVPSLEVVDKMKVFWQQLLDSKLISYRKFNNLTKAERGGLNELDKVGFIKRQLVETRQITKHVAQILDARFNKEVTEKDKKNRTVKIITLKSNLVSNFRKEFELYKVREINDYHHAHDAYLNAVVAKAILKKYPKLEPEFVYGDYQKYDLSKDPKEIEKATEKYFFYSNLLNFFKEEVHYADGTIVKRENIEYSKDTGEIAWNKEKDFATIKKVLSLPQVNIVKKREVQTGGFSKESILPKGNSDKLIPRKTKDILWDTTKYGGFDSPVIAYSILLIADIEKGKAKKLKTVKTLVGITIMEKDAFEKNPIAFLENKGYHNVCKENILCLPKYSLFELENGRRRLLASAKELQKCNEIVLPVYLTTLLYHSKNVHKLDEPGHLEYIQKHRNEFKDLLNLVSEFSQKYVLADANLEKIKNLYADNEQADIEILANSFINLLTFTALGAPAAFKFFGKDVDRKRYTTVSEILNATLIHQSITGLYETRIDLSKLGED

SEQ ID NO: 183 - protein, 1360 aa, unidentified
  source 1..1360: note = Streptococcus sp. FF10
MKKPYSIGLDIGTNSVGWSVVTDDYKVPAKKMKVLGNTDKEYIKKNLIGALLFDSGETAEATRMKRTARRRYTRRRNRILYLQDIFSPELNQVDESFLHRLDDSFLVAEDKRGERHVIFGNIADEVKYHKEFPTIYHLRKHLADSSEKADLRLVYLALAHIIKYRGHFLIDEPIDIRNMNSQNLFKEFLLAFDGIQVDCYLASKHTDISGIITAKISKSRKVEAVLEQFPDQKKNSFFGNMVSLVFGLMPNFKSNFELDEDAKLQFSRDSYDEDLENLLGIIGDEYADVFVAAKKVYDSILLSGILTTNNHSTKAPLSASMIDRYDEHNSDKKLLRDFIRTNIGKEVFKEVFYDTSKNGYAGYIDGKTNQEDFYKYLKNLLQKVDGGDYFIEKIEREDFLRKQRTFDNGSIPHQVHLDEMKAILRRQGEFYPFLKENAEKIQQILTFKIPYYVGPLARGNSRFAWASYNSNEKMTPWNFDNVIDKTSSAQAFIERMTNNDLYLPDQKVLPKHSLLYQKFAVYNELTKIKYVTETGEARLFDVFLKKEIFDGLFKKERKVTKKKILNFLDKNFDEFRITDIQGLDNETGNFNASYGTYHDLLKIIGDKEFMDSSDNVDVLEDIVLSLTLFEDREMIKQRLLKYEDIFSKKVIANLTRRHYTGWGRLSAKLINGIKDKHSRKTILDYLIDDGHSNRNFMQLINDDNLSFKDEIANSQVIGDGDDLHQVVQELAGSPAIKKGILQSLKIVDELVKVMGYNPEQIVVEMARENQTTARGRNNSQQRLGSLTKAIQDFGSDILKRYPVENNQLQNDQLYLYYLQNGKDMYTGDTLDIHNLSQYDIDHIIPQSFIKDNSLDNRVLTNSKSNRGKSDNVPSNEVVKRMKGFWLKQLDAKLISQRKFDNLTKAERGGLSAEDKAGFIKRQLVETRQITKHVARILDERFNRDFDKNDKRIRNVKIVTLKSNLVSNFRKEFGFYKVREINNFHHAHDAYLNAVVAKALLIRYPKLEPEFVYGEYPKYNSYRERKATEKMFFYSNIMNMFKTTIKLADGRVVEKPVIEANEETGEIAWDKTKHFANVKKVLSYPQVSIVKKVEEQTGGFSKESILPKGGSDKLIARKTKNNYLSTQKYGGFDSPTVAYSIMFVADIEKGKSKRLKTVKEMIGITIMERSRFESNSVTFLEEKGYRNIRENTIIKFPKYSLFELENGRRRLLASAIELQKGNEMFLPQQFVNLLYHAQHANKEDSVIYLEKHRHELSELFHHIIGVSEKTILKPKVEMTLNEAFEKHFEFDEVSELAQSFISLLKFTAFGAPGGFKFLDADIKQSNLRYQTVTEVLSSTLIHQSVTGLYETRIDLSKLGGE

SEQ ID NO: 184 - protein, 1364 aa, unidentified
  source 1..1364: note = Streptococcus sp. M334
SNKSYSIGLDIGTNSVGWAVITDDYKVPSKKMKVLGNTDKHFIKKNLIGALLFDEGTTAEDRRLKRTARRRYTRRKNRLRYLQEIFSQEISKVDSSFFHRLDDFFLVPEDKRGSKYPIFATLVEEKEYHKKFPTIYHLRKHLADSKEKTDLRLIYLALAHMIKYRGHFLYEESFDIKNNDIQKIFSEFISIYDNTFEGKSLSGQNAQVEAIFTDKISKSTKRERVLKLFPDEKSTGLFSEFLKLIVGNQADFKKHFDLEEKAPLQFSKDTYDEDLENLLGQIGDDFADLFLVAKKLYDAILLSGILTVKDLSTKAPLSASMIERYENHQKDLAALKQFIQNNLQEKYDEVFSDQSKDGYAGYIDGKTTQEAFYKYIKNLLSKFEGADYFLDKIEREDFLKKQRTFDNGSIPHQIHLQEMNAIIRRQGEHYPFLQENKEKIEKILTFRIPYYVGPLARGNGDFAWLTRNSDQAIRPWNFEEIVDQASSAEDFINKMTNYDLYLPEEKVLPKHSLLYETFAVYNELTKVKFIAEGLTRYQFLDKKQKKDIFDTFFKAENKRKVTEKDIIHYLHNVDGYDGIELKGIEKQFNASLSTYHDLLKIIKDKAFMDDSKNEEILENIIHTLTIFEDREMIKQRLAQYDSLFDEKVIKALTRRHYTGWGKLSAKLINGIRDKKSGKTILDYLIDDGEINRNFMQLIHDDGLSFKEIIQKAQVFGKTNDVKQVVQELPGSPAIKKGILQSIKIVDELVKVMGHAPESIVIEMARENQTTARGKKNSQQRYKRIEDSLKNLASNILKENPTDNIQLQNDRLFLYYLQNGRDMYTGKPLEINQLSNYDIDHIIPQAFIKDDSLDNRVLTSSKDNRGKSDNVPSLEVVEKMKAFWQQLLDSKLISERKFNNLTKAERERGGLNELDKVGFIKRQLVETRQITKHVAQFLDARFNKEVTEKDKKNRNVKIITLKSNLVSNFRKEFGLYKVREINDYHHAHDAYLNAVLAKAILKKYPKLEPEFVYGDYQKYDLSREPKEVEKATQKYFFYSNLLNFFKEEVHYADGTIVKRENIEYSKDTGEIAWNKEKDFATVKKVLSLPQVNIVKKTEVQTGGFSKESILPKGNSDKLIPRKTKEILWDTTKYGGFDSPVIAYSILLIADIEKGKAKKLKTVKTLVGITIMEKATFEKNPITFLENKGYHNVRKENILCLPKYSLFELESGRRRMLASAKELQKGNEIVLPVYLTTLLYHSKNVHKLDEPEHLEYIQKHRYEFKDLLNLVSEFSQKYVLADANLEKIKNLYADNEQADIEILANSFINLLTFTALGAPAAFKFLGKDVDRKRYTTVSEILNATLIHQSITGLYETRIDLSKLGED

SEQ ID NO: 185 - protein, 1360 aa, unidentified
  source 1..1360: note = Streptococcus sp. taxon 056
NNNNYSIGLDIGTNSVGWAVITDDYKVPSKKMRVLGNTDKRFIKKNLIGALLFDEGTTAEDRRLKRTARRRYTRRKNRLRYLQEIFAEEMSKVDSSFFHRLDDSFLVPEDKSGSKYPIFATLAEEKEYHKKFPTIYHLRKHLADSKEKADLRLIYLALAHITKYRGHFLYEEAFDIKNNDIQKIFNEFINIYDNTFEGSSLSGQNAQVEAIFTGKISKSVKREHVLKLFPDEKSTGLFSEFLKLIVGNQADFKKHFDLEEKASLQFSKDTYDEDLENLLGQIGDDFADLFLVAKKLYDAILLSGILTVTDPSTKAPLSASMIERYENHQEDLAALKQFIKNNLPEKYAEVFSDQSKDGYAGYIDGKTTQEAFYKYIKNLLSKFEGADYFLDKIEREDFLRKQRTFDNGSIPHQIHLQEMNAILRRQGEHYPLLKENKEKIEKILTFRIPYYVGPLARGNRDFAWLTRNSDQAIRPWNFEEIVDKASSAESFINKMTNYDLYLPEEKVLPKHSLLYETFAVYNELTKVKFIAEGLRDYQFFDSGQKKQIVNQLFKEKRKVTEKDIIHYLHNVDGYDGIELKGIEKQFNASLSTYHDLLKIIKDKEFMDNHKNQEILENIVHTLTIFEDREMIKQRLAQYDSIFDEKVIKALTRRHYTGWGKLSAKLINGICDKKTGKTILDYLIDDGYNNRNFMQLINDDGLSFKEIIQKAQVVGKTDDLTQVVRELSGSPAIKKGILQSIKIVDELVKIMGYAPESIVIEMARENQTTAKGKKNSQQRYKRIEDALKNLAPTISKENPTDNIQLQNDRLFLYYLQNGKDMYTGEALDINQLSSYDIDHIIPQAFIKDDSLDNRVLTSSKDNRGKSDNVPSLEVVKKRKAFWQQLLDSKLISERKFNNLTKAERGGLDERDKVGFIKRQLVETRQITKHVARILDARFNTEVSEKNQKIRSVKIITLKSNLVSNFRKEFKLYKVREINDYHHAHDAYLNAVVAKAILKKYPKLEPEFVYGDYQKYDLSKDPKEVEKATEKYFFYSNLLNFFKEEVHYADGTIVKRENIEYSKDTGEIAWNKEKDFVTIKKVLSYPQVNIVKKREVQTGGFSKESILPKGNSDKLIPRKTKDILWDTTKYGGFDSPVIAYSILLIADIEKGKAKKLKTVKTLVGITIMEKAAFEKNPITFLENKGYHNVRKENILCLPKYSLFELENGRRRLLASAKELQKGNEIVLPVYLTTLLYHSKNVHKLDEPEHLEYIQKHRYEFKDLLNLVSEFSQKYVLAEANLEKIKSLYVDNEQADIEILANSFINLLTFTALGAPAAFKFFGKDVDRKRYTTVSEILNATLIHQSITGLYETRIDLSKLGED

SEQ ID NO: 186 - protein, 1359 aa, Streptococcus suis
MKKKYAIGIDIGTNSVGWSVVTDDYKVPSKKMKVFGNTEKRYIKKNLLGTLLFDEGNTAENRRLKRTARRRYTRRRNRILYLQEIFAEEINKIDDSFFQRLDDSFLIVEDKQGSKHPIFGTLQEEKKYHKQFPTIYHLRKQLADSSQKADIRLIYLALAHIIKYRGHFLFEGDLKSENKDVQHLFNDFVEMFDKTVEGSYLSENLPNVADVLVEKVSKSRRLENILHYFPNEKKNGLFGNFLALALGLQPNFKTNFELAEDAKIQFSKETYEEDLEELLGKIGDDYADLFIATKSLYDGILLAGILSTTDSTTKAPLSSSMVNRYEEHKKDLALLKNFIHQNLSDSYKEVFNDKLKDGYAGYIEGKTTQENFYRFIKKAIEKIEGSDYFIDKIDREDFLRKQRTFDNGSIPHQIHLQEMHAIIRRQAEFYPFLVENQDKIEKILTFRIPYYVGPLARGKSEFAWLNRKSDEKIRPWNFDEMVDKETSAENFITRMTNYDQYLPDQKVLPKHSLLYEKFAVYNELTKVKFIAEGMRDYQFLDSGQKKDIVKTLFKTKRKVTAKDIKAYLENSNGYAGVELKGLEEQFNASLPTYHDLLKILRDKAFIDAEENQEILEDIVLTLTLFEDREMIRKRLEKYKDILTEEQRKKLERRHYTGWGRLSAKLINGILDKVTRKTILGYLIDDGTSNRNFMQLINDDTLSFVDEIRLAQGSGEAEDYRAEVQNLAGSPAIKKGILQSLKIVDELIEVMGYDPEHIVVEMARENQFTNQGRRNSQQRYKKIENAIKNLNSKILKEYPTNNQALQNDRLFLYYLQNGKDMYTDEELDIDQLSQYDIDHIIPQAFIKDDSLDNKVLTKSAKNRGKSDDVPSLEIVHKKKNFWKQLLDSQLISQRKFDNLTKAERGGLTNEDKARFIQRQLVETRQITKHVARILDTRFNTKLDEAGNRIRDPKVNIITLKSNLVSQFRKDYQLYKVREINNYHHAHDAYLNAVVATALLKKYPQLAPEFVYGDYPKYNSYKSRKATEKVLFYSNIMNFFRRVLVYSKTGEVRIRPVIEVNKETGEIVWDKKSDFRTVRKVLSYPQVNVVKKVEMQTGGFSKESILQHGDSDKLIPRKTEKFYLDTKKYGGFDSPTIAYSVLLIADIEKGKAKKLKRVKELIGITIMERMAFEKNPIEFLEHKGYKNILEKNIIKLPKYSLFELENGRRRLLASAKELQKGNEMILPPHLVTLLYHSSNIHKITEPIHLNYVNKNKHEFKELLRHISDFSTRYILAQDRLSKIEELYDKNDGDDISDLTSSFVNLLTFTAIGAPAAFKFLGSVIDRKRYTSIAEILEATLIHQSVTGLYETRIDLSKLGGD

SEQ ID NO: 187 - protein, 1361 aa, Streptococcus suis
MKKKYAIGIDIGTNSVGWSVVTDDYKVPSKKMKVFGNTEKRYIKKNLLGTLLFDEGNTAENRRLKRTARRRYTRRRNRILYLQEIFAEEINKIDDSFFQRLDDSFLIVEDKQGSKHPIFGTLQEEKEYHKQFPTIYHLRKQLADSSQKADIRLIYLALAHIIKYRGHFLFEGDLKSENKDVQHLFNDFVEMFDKTVEGSYLSENLPNVADVLVEKVSKSRRLENILHYFPNEKKNGLFGNFLTLALGLQPNFKTNFELAEDAKIQFSKETYEEDLEELLGKIGDDYADLFIATKSLYDGILLAGILSTTDSTTKAPLSSSMVNRYEEHQKDLALLKNFIHQNLSDSYKEVFNDKLKDGYAGYIEGKTTQENFYRFIKKAIEKIEGSNYFIDKIDREDFLRKQRTFDNGSIPHQIHLQEMHAIIRRQAEFYPFLVENQDKIEKILTFRIPYYVGPLARGKSEFAWLNRKSDEKIRPWNFDEMVDKETSAENFITRMTNYDQYLPDQKVLPKHSLLYEKFAVYNELTKVRYVTEQGKSFFFDANMKQEIFDGVFKVYRKVTKEKLMDFLGKEFDEFRIVDLLGLDKDNKSFNASLGTYHDLKKIVSKDLLDNPENEDILENVVLTLTLFEDREMIRKRLEKYKDVLTEEQRKKLERRHYTGWGRLSAKLINGIRDKVTRKTILDYLIDDGTSNRNFMQLINDDTLSFVDEIRLAQGSGEAEDYRAEVQNLAGSPAIKKGILQSLKIVDELIEVMGYDPEHIVVEMARENQFTNQGRRNSQQRYKKIENAIKNLNSKILKEYPTNNQALQNDRLFLYYLQNGKDMYTDEELDIDQLSQYDIDHIIPQAFIKDDSLDNKVLTKSAKNRGKSDDVPSLEIVHKKKNFWKQLLDSQLISQRKFDNLTKAERGGLTNEDKARFIQRQLVETRQITKHVARILDTRFNTKLDEAGNRIRDPKVNIITLKSNLVSQFRKDYQLYKVREINNYHHAHDAYLNAVVATALLKKYPQLAPEFVYGDYPKYNSYKSRKATEKVLFYSNIMNFFRRVLVYSKTGEVRIRPVIEVNKETGEIVWDKKSDFRTVRKVLSYPQVNVVKKVEMQTGGFSKESILQHGDSDKLIPRKTEKFYLDTKKYGGFDSPTIAYSVLLIADIEKGKAKKLKRVKELIGITIMERMAFEKNPIEFLEHKGYKNILEKNIIKLPKYSLFELENGRRRLLASAKELQKGNEMILPPHLVTLLYHSSNIHKITEPIHLNYVNKNKHEFKELLRHISDFSTRYILAQDRLSKIEELYDKNDGDDISDLTSSFVNLLTFTAIGAPAAFKFLGSVIDRKRYTSIAEILEATLIHQSVTGLYETRIDLSKLGGD

SEQ ID NO: 188 - protein, 1361 aa, Streptococcus suis
MKKKYAIGIDIGTNSVGWSVVTDDYKVPSKKMKVFGNTEKRYIKKNLLGTLLFDEGNTAENRRLKRTARRRYTRRRNRILYLQEIFAEEINKIDDSFFQRLDDSFLIVEDKQGSKHPIFGTLQEEKEYHKQFPTIYHLRKQLADSSQKADIRLIYLALAHIIKYRGHFLFEGDLKSENKDVQHLFNDFVEMFDKTVEGSYLSENLPNVADVLVEKVSKSRRLENILHYFPNEKKNGLFGNFLALALGLQPNFKTNFELAEDAKIQFSKETYEEDLEELLGKIGDDYADLFIATKSLYDGILLAGILSTTDSTTKAPLSSSMVNRYEEHQKDLALLKNFIHQNLSDSYKEVFNDKLKDGYAGYIEGKTTQENFYRFIKKAIEKIEGSNYFIDKIDREDFLRKQRTFDNGSIPHQIHLQEMHAIIRRQAEFYPFLVENQDKIEKILTFRIPYYVGPLARGKSEFAWLNRKSDEKIRPWNFDEMVDKETSAENFITRMTNYDQYLPDQKVLPKHSLLYEKFAVYNELTKVRYVTEQGKSFFFDANMKQEIFDGVFKVYRKVTKEKLMDFLGKEFDEFRIVDLLGLDKDNKSFNASLGTYHDLKKIVSKDLLDNPENEDILENVVLTLTLFEDREMIRKRLEKYKDVLTEEQRKKLERRHYTGWGRLSAKLINGIRDKVTRKTILDYLIDDGTSNRNFMQLINDDTLSFVDEIRLAQGSGEAEDYRAEVQNLAGSPAIKKGILQSLKIVDELIEVMGYDPEHIVVEMARENQFTNQGRRNSQQRYKKIENAIKNLNSKILKEYPTNNQALQNDRLFLYYLQNGKDMYTDEELDIDQLSQYDIDHIIPQAFIKDDSLDNKVLTKSAKNRGKSDDVPSLEIVHKKKNFWKQLLDSQLISQRKFDNLTKAERGGLTNEDKARFIQRQLVETRQITKHVARILDTRFNTKLDEAGNRIRDPKVNIITLKSNLVSQFRKDYQLYKVREINNYHHAHDAYLNAVVATALLKKYPQLAPEFVYGDYPKYNSYKSRKATEKVLFYSNIMNFFRRVLVYSKTGEVRIRPVIEVNKETGEIVWDKKSDFRTVRKVLSYPQVNVVKKVEMQTGGFSKESILQHGDSDKLIPRKTEKFYLDTKKYGGFDSPTIAYSVLLIADIEKGKAKKLKRVKELIGITIMERMAFEKNPIEFLEHKGYKNILEKNIIKLPKYSLFELENGRRRLLASAKELQKGNEMILPPHLVTLLYHSSNIHKITEPIHLNYVNKNKHEFKELLRHISDFSTRYILAQDRLSKIEELYDKNDGDDISDLTSSFVNLLTFTAIGAPAAFKFLGSVIDRKRYTSIAEILEATLIHQSVTGLYETRIDLSKLGGD

SEQ ID NO: 189 - protein, 1359 aa, Streptococcus suis
MKKKYAIGIDIGTNSVGWSVVTDDYKVPSKKMKVFGNTEKRYIKKNLLGTLLFDEGNTAENRRLKRTARRRYTRRRNRILYLQEIFAEEINKIDDSFFQRLDDSFLIVEDKQGSKHPIFGTLQEEKKYHKQFPTIYHLRKQLADSSQKADIRLIYLALAHIIKYRGHFLFEGDLKSENKDVQHLFNDFVEMFDKTVEGSYLSENLPNVADVLVEKVSKSRRLENILHYFPNEKKNGLFGNFLALALGLQPNFKTNFELAEDAKIQFSKETYEEDLEELLGKIGDDYADLFIATKSLYDGILLAGILSTTDSTTKAPLSSSMVNRYEEHKKDLALLKNFIHQNLSDSYKEVFNDKLKDGYAGYIEGKTTQENFYRFIKKAIEKIEGSDYFIDKIDREDFLRKQRTFDNGSIPHQIHLQEMHAIIRRQAEFYPFLVENQDKIEKILTFRIPYYVGPLARGKSEFAWLNRKSDEKIRPWNFDEMVDKETSAENFITRMTNYDQYLPDQKVLPKHSLLYEKFAVYNELTKVKFIAEGMRDYQFLDSGQKKDIVKTLFKTKRKVTAKDIKAYLENSNGYAGVELKGLEEQFNASLPTYHDLLKILRDKAFIDAEENQEILEDIVLTLTLFEDREMIRKRLEKYKDILTEEQRKKLERRHYTGWGRLSAKLINGILDKVTRKTILGYLIDDGTSNRNFMQLINDDTLSFVDEIRLAQGSGEAEDYRAEVQNLAGSPAIKKGILQSLKIVDELIEVMGYDPEHIVVEMARENQFTNQGRRNSQQRYKKIENAIKNLNSKILKEYPTNNQALQNDRLFLYYLQNGKDMYTDEELDIDQLSQYDIDHIIPQAFIKDDSLDNKVLTKSAKNRGKSDDVPSLEIVHKKKNFWKQLLDSQLISQRKFDNLTKAERGGLTNEDKARFIQRQLVETRQITKHVARILDTRFNTKLDEAGNRIRDPKVNIITLKSNLVSQFRKDYQLYKVREINNYHHAHDAYLNAVVATALLKKYPQLAPEFVYGDYPKYNSYKSRKATEKVLFYSNIMNFFRRVLVYSKTGEVRIRPVIEVNKETGEIVWDKKSDFKTVRKVLSYPQVNVVKKVEMQTGGFSKESILQHGDSDKLIPRKTEKFYLDTKKYGGFDSPTIAYSVLLIADIEKGKAKKLKRVKELIGITIMERMAFEKNPIEFLEHKGYKNILEKNIIKLPKYSLFELENGRRRLLASAKELQKGNEMILPPHLVTLLYHSSNIHKITEPIHLNYVNKNKHEFKELLRHISDFSTRYILAQDRLSKIEELYDKNDGDDISDLTSSFVNLLTFTAIGAPAAFKFLGSVIDRKRYTSIAEILEATLIHQSVTGLYETRIDLSKLGGD

SEQ ID NO: 190 - protein, 1351 aa, Streptococcus suis
MDQKYSIGLDIGTNSVGWAVVTDDYKVPAKKMKVLGNTDKQSIKKNLLGALLFDSGETAEATRLKRTARRRYTRRRNRLRYLQEIFAEEMNKVDENFFQRLDDSFLVDEDKRGERHPIFGNIAAEVKYHDDFPTIYHLRKHLADISQKADLRLVYLALAHMIKFRGHFLIEGQLKAENTNVQALFKDFVEVYDKTVEESHLSEMTVDALSILTEKVSKSRRLENLIAHYPAEKKNTLFGNLIALSLGLQPNFKTNFQLSEDAKLQFSKDTYEEDLEGLLGEIGDEYADLFASAKNLYDAILLSGILTVDDNSTKAPLSASMVKRYEEHQKDLKKLKDFIKVNAPDQYNAIFKDKNKKGYAGYIENGVKQDEFYKYLKGILLQINGSGDFLDKIDREDFLRKQRTFDNGSIPHQIHLQEMHAILRRQEEHYPFLKENQDKIEKILTFRIPYYVGPLARKGSRFAWAEYKADEKITPWNFDDILDKEKSAEKFITRMTLNDLYLPEEKVLPKHSLLYETFTVYNELTKVKYVNEQGEAKFFDANMKQEIFDHVFKENRKVTKDKLLNYLGKEFDEFRIVDLTGLDKENKVFNSSLGTYHDLRKILDKSFLDNKENEQIIEDIIQTLTLFEDREMIRQRLQKYSDIFTKAQLKKLERCHYTGWGRLSYKLINGIRNKENKKTILDYLIDDGYANRNFMQLINDDALSFKEEIAKAQVIGETDDLNQVVSDIAGSPAIKKGILQSLKIVDELVKVMGYNPANIVIEMARENQTTDKGRRNSQQRLKLLQDSLKPVNIKNVENQQLQNDRLFLYYIQNGKDMYTGETLDINNLSQYDIDHIIPQAFIKDDSFDNRVLTSSSENRGKSDNVPSIEVVRARKADWMRLRKAGLISQRKFDNLTKAERGGLTENDKAGFIKRQLVETRQITKHVAQVLDARFNAKHDENKKVIRDVKIITLKSNLVSQFRKDFKFYKVREINDYHHAHDAYLNAVIGTALLKKYPKLASEFVYGEFKKYDVSDKEIGKATAKYFFYSNLMNFFKKEVKFADGTVVERPDIETSEDGEIAWNKQTDFKIVRKVLSYPQVNIVKKTEVQTHGLDRPSPKPKPDSSENLVGVKRNLDPKKYGGYAGISNSYAVLVKAIIEKGVKKKETMVLEFQGISILDRITFEKDKRAFLLGKGYKDIKKIIELPKYSLFELKDGSRRMLASRGEIHKGNELFVPQKFTTLLYHAKRINNPINKDHIEYVKKHRDDFKELLNYVLEFNEKYVGATKNGERLKEAVADFDSKSNEEICTSFLGLFELTSLGSASDFEFLGVKIPRYRDYTPSSLLKDSTLIHQSITGLYETRIDLSKLGED

SEQ ID NO: 191 - protein, 1256 aa, Brochothrix thermosphacta
MWGVSLFEAGKTAAERRGYRSTRRRLNHRKFRLRLLEDMFEKEILSKDPSFFIRLKEAFLSPKDEQKQFLFNDKDYTDADYYEQYKTIYHLRYDLISQHRQFDIREVYLAIHHLIKYRGHFIYEDQTFTTDGNQLQHHIKAIITMINSTLNRIIPETIDINVFEKILLDRMMNRSSKVKFLIELTGKQDKPLLKELFNLIVGLKAKPASIFEQENLATIVETMNMSTEQVQLDLLTLADVLADEEYDLLLTAQKIYSAIILDESMDGYEYFAEAKKESYRKHQEELVLVKKMLKSNAITNDERAKFEYFYTDYIGYEESKSKEERLFKHIELLLAKENVLTTVEHALLEKNITFASLLPLQRSSRNAVIPYQVHEKELVAILENQATYYPFLLEQKDNIHKLLTFRIPYYVGPLADQKDSEFAWMVRKQAGKITPFNFEEMVDIDASSEAFIKRMTNKCTYLIHEDVIPKHSFSYAKFEVLNELNKIRLDGKPIDIPLKKRIFEGLFLEKTKVTQTSLKKWLAEHEHMTVSVVQGTQKETEFATSLQAFHRFVKIFDRETVSNPANEEMFEKIIYWSTVFEDKKIMRRKLSEYPQLTEQQQVQLAQVRFRGWGRLSQRLINRIKTPEDHKLSINEILQTNENFMQIIRNKDYLFKKIIEEQFENETALLNKQRIDELAASPANKKGIWQAIKIVKELEKVLQQPAENIFIEFARSDEESKRSTPRDKFIEKAYAETDTEHLKELKQRSKQLSSQRLFLYFIQNGKCMYSGEHLDIERLDSYEVDHILPQSYIKDNSIENLALVKKVENQRKKDSLLLNSSIINQNYSRWEQLKNAGLIGEKKFRNLTRTKITDRDKEGFIARQLVETRQITKHVTQLLQQEYKDTTKVFAIKATLVSGLRRKFEFIKNRNVNDYHHAQDAFLVAFLGTNITSNYPKIEMEYLFKGYQHYLNEVGKAAKPKFTFIVENLSKQQNSTTGEVKWNPEVDIAKLKRILNFKQCNIVRKVEEQSGALFKETIYPVEESSSKTIPLKKHLDTAIYGGYTAVNYASYALIQFKKGRKLKREIIGIPLAVQTRIDNSETSLQAYIAEQIKSEVEILNGRILKYQLISNNGNRLYIAGSERHNARQLIVSDEAAKVIWLISTKQADEAMFLKYYRLEHLEAVFEELIRKQAADYQIFEKLIKKIEVNFYSCTYNEKVKVIELLKITQANATNGDLKLLKMSNREGRLGSVSVALDFKIINQSVTGLYQSIEDYNN

SEQ ID NO: 192 - protein, 1290 aa, Catenibacterium mitsuokai
IVDYCIGLDLGTGSVGWAVVDMNHRLMKRNGKHLWGSRLFSNAETAANRRASRSIRRRYNKRRERIRLLRAILQDMVLEKDPTFFIRLEHTSFLDEEDKAKYLGDNYNLFIDEDFNDYTYYHKYPTIYHLRKALCESTEKADPRLIYLALHHIVKYRGNFLYEGQKFNMDASNIEDKLSDIFTQFTSFNNIPYEDDKKNLEILEILKKPLSKKAKVDEVMTLIAPEKDYKSAFKELVTGIAGNKMNVTKMILCEPIKQGDSEIKLKFSDSNYDDQFSEVEKDLGEYVEFVDALHNVYSWVELQTIMGATHTDNASISEAMVSRYNKHHDDLKLLKDCIKNNVPNKYFDMFRNDSEKSKGYYNYINRKAPVDEFYKYVKKCIEKVDTPEAKQILNDIELENFLLKQNSRTNGSVPYQMQLDEMIKIIDNQAEYYPILKEKREQLLSILTFRIPYYFGPLETSEHAWIKRLEGKENQRILPWNYQDIVDVDATAEGFIKRMRSYCTYFPDEEVLPKNSLIVSKYEVYNELNKIRVDDKLLEVDVKNDIYNELFMKNKTVTEKKLKNWLVNNQCCSKDAEIKGFQKENQFSTSLTPWIDFTNIFGKIDQSNFDLIENIIYDLTVFEDKKIMKRRLKKKYALPDDKVKQILKLKYKDWSRLSKKLLDGIVADSVTVLDVLESRLNLMEIINDKDLGYAQMIEEATSCPEDGKFTYEEVERLAGSPALKRGIWQSLQIVEEITKVMKCRPKYIYIEFERSEEKERTESKIKKLENVYKDEQTSVLEELKGFDNTKKISSDSLFLYFTQLGKCMYSGKKLDIDSLDKYQIDHIVPQSLVKDDSFDNRVLVVPSENQRKLDDLVVPFDIRDKMYRFWKLLFDHELISPKKFYSLIKTEYTERDEERFINRQLVETRQITKNVTQIIEDHYSTTKVAAIRANLSHEFRVKNHIYKNRDINDYHHAHDAYIVALIGGFMRDRYPNMHDSKAVYSEYMKMFRNKNDQKGFVINSMNYPYEVDGKLIWNPDLINEIKKCFYYKDCYCTTKLDQKSGQLFNTVLSNDAHADKGAVVPVNKNRSDVHKYGGFSGLQYTIVAIEGQKKKGKKTELVKKISGVPLHLKAASINEKINYIEEKEGLSDVRIIKDNIPVNQMIEMDGGEYLLTSEYVNARQLVLNEKQCALIADIYNAIYKQDYDNLDDILMIQLYIELTNKMKVLYPAYRGIAEKFESYVVISKEEKANIIQMLIVMHRGPQNGNIVYDDFKISDRIGRLKTKNHNLNIVFISQSPTGIYTKKYKL

SEQ ID NO: 193 - protein, 1359 aa, synthetic construct; identical to SEQ ID NO: 11
  REGION 1..1359: note = Synthetic Polypeptide

SEQ ID NO: 194 - protein, 1317 aa, unidentified
  source 1..1317: note = Clostridiales bacterium S5-A11
MKNYTIGLDIGTNSVGWAVIKDDLTLVRKKIKISGNTDKKEVKKNLWGSFLFEQGDTAQDTRVKRIARRRYERRRFRIRELQKIFDKSMGEVDSNFFHRLDESFLVEEDKEYSKYPIFSNEKEDKNYYDKYPTIYHLRKDLADSNQKADLRLIYLALAHMIKYRGHFLIEGDLKMDGISISESFQEFIDSYNEVCALEDENNDELLTQIENIFKQDISRSKKLDQAIALFQGKRQSLFGIFLTLIVGNKANFQKIFNLEDDIKLDLKEEDYDENLEELLSNIDEGYRDVFLQAKNVYNAIELSKILKTDGKETKAPLSAQMVELYNQHREDLKKYKDYIKAYLPEKYGETFKDATKNGYAGYIDGKTSQEDFYKFVKAQLKGEENGEYFLEAIENENFLRKQRSFYNGVIPYQIHLQELTAVLDQQEKHYSFLKENRDKIISLLTFRIPYYVGPLAKGESRFAWLERSNSEEKIKPWNFDKIVDIDKSAELFIENLTSRDTYLPDEPVLPKRSLIYQKFTIFNELTKISYIDERGILQNFSSREKIAIFNDLFKNKSKVTKNQLVKYIENKEQIIAPEIKGIEDSFNSNYSTYIDLSKIPDMKLLEKDEDEILEEIIKILTIFEDRKMRKRQLMKFKDKLSEKAINQLSKKHYTGWGQLSEKLINGIRDEQSNKTILDYLIDNGCPKNMNRNFMQLINDDTLSFKEKIRKAQDINQVNDIKEIVKDLPGSPAIKKGIYQSIRIVDEIIRKMKDRPKNIVIEMARENQTTQEGKNKSKARLKKIQEGLENLDSHVEKQALDEEMLKSPKYYLYCLQNGKDIYTGKDLDIGQLQTYDIDHIIPRSFITDNSFDNLVLTSSTVNRGKLDNVPSPDIVRQQKGFWKQLLRAGLMSQRKFNNLTKGKLTDRDRQQFINRQLVETRQITKHVANLLSHHLNEKKEVGEINIVLLKSALTSQFRKKFDFYKVREVNDYHHAHDAYLNGVIALKLLELYPYMAKDLIYGKYSYHRKGDKATQAKYKMSNIIERFSQDLLANPDGEIAWEKDKDLNTIRKVLSSKQINIIKKAEEGKGRLFKETINSRPSKKTEKRIPIKNNLDPNIYGGYIEEKMAYYIAINYLENGKTKKAIVGISIKDKKDFEGQTTEYLGKIGFNKASIINSFKNYTLFELENGSRRMIVGKGELQKGNQMYLPQNLLEFVYHLKHYNEDETSHKFIVEHKAYFDELLNYIVEFANKYLELENSIEKIKDLYHGKGPDVEEKELVESFINLLAITKCGPAADITFLGEKISRKRYRSTNCLWGSEVIFQSPTGLYETRLRLE

SEQ ID NO: 195 - protein, 1359 aa, synthetic construct; identical to SEQ ID NO: 11
  REGION 1..1359: note = Synthetic Polypeptide

SEQ ID NO: 196 - protein, 1327 aa, Dolosigranulum pigrum
MQKNYTIGLDIGTNSVGWAVMKDDYTLIRKRMKVLGNTDIKKIKKNFWGVRLFDEGETAKETRLKRGTRRRYQRRRNRLIYLQDIFQQPMLAIDENFFHRLDDSFFVPDDKSYDRHPIFGSLEEEVAYHNTYPTIYHLRKHLADNPEKADLRLVYTALAHIVKYRGHFLIEGELNTENTSISETFEQFLDTYSDIFKEQLVGDISKVEEILSSKQSRSRKHEQIMALFPNENKLGNFGRFMMLIVGNTSNFKPVFDLDDEYKLKLSDETYEEDLDTLLGMTDDVFLDVFMAAKNVYDAVEMSAIISTDTGNSKAVLSNQMINFYDEHKVDLAQLKQFFKTHLPDKYYECFSDPSKNGYAGYIDGKTNQEDFYKYIEKVMKTIKSDKKDYFLDKIDREVFLRKQRSFYNSVIPHQIHLQEMQAILDRQSQYYPFLAENRDKIESLVTFRIPYYVGPLTVSDQSEFAWMERQSDEPIRPWNFDEIVNKERSAEKFIERMTNMDTYLLEEKVLPKRSLLYQTFEVYNELTKVRYTNEQGKTEKLNRQQKAEIIETLFKQKNRVREKDIANYLEQYGYVDGTDIKGVEDKFNASLSTYNDLAKIDGAKAYLDDPEYADVWEDIIKILTIFEDKAMRKKQLQTYSDTLSPEILKKLERKHYTGWGRFSKKLINGLRDEGSNKTILDYLKDEGSSGPTNRNFMQLIRDNTLSFKKKIEDAQTIEDTTHIYDTVAELPGSPAIKKGIRQALKIVEEIIDIIGYEPENIVVEMARESQTTKKGKDLSKERLEKLTEAIKEFDGVKVKDLKNENLRNDRLYLYYLQNGRDMYTNEPLDINNLSKYDIDHIIPQSFTTDNSIDNKVLVSRTKNQGNKSDDVPSINIVHKMKPFWRQLHKAGLISDRKFKNLTKAEHGGLTEADRAHFLNRQLVETRQITKHVANLLDSQYNTAEEQRINIVLLKSSMTSRFRKEFKLYKVREINDYHHGHDAYLNAVVATTIMKVYPNLKPQFVYGQYKKTSMFKEEKATARKHFYSNITKFFKKEKVVNEETGEILWDTERHLSTIKRVLSWKQMNIVKKVEKQKGQLWKETIYPKGDSSKLIPVKEGMDPQKYGGLSQVSEAFAVVITHEKGKKKQLKSDLISIPIVDQKAYEQHPTAYLEEAGYNNPTVLHELFKYQLFELEDGSRRMIASAKEFQKGNQMVLPLELVELLYHANRYDKVKFPDSIEYVHDNLAKFDDLLEYVIDFSNKYINADKNVQKIQKIYKEHGTEDVELTVESFVNLMTFTAMGAPATFKFYGESITRSRYTSITEFRGSTLIFQSITGLYETRYKLED

SEQ ID NO: 197 - protein, 1329 aa, synthetic construct
  REGION 1..1329: note = Synthetic Polypeptide
MKKDYVIGLDIGTNSVGWAVMTEDYQLVKKKMPIYGNTEKKKIKKNFWGVRLFEEGHTAEDRRLKRTARRRISRRRNRLRYLQAFFEEAMTDLDENFFARLQESFLVPEDKKWHRHPIFAKLEDEVAYHETYPTIYHLRKKLADSSEQADLRLIYLALAHIVKYRGHFLIEGKLSTENISVKEQFQQFMIIYNQTFVNGESPLPESVLIEEELTEKASRTKKSEKVLQQFPQEKANGLFGQFLKLMVGNKADFKKVFGLEEEAKITYASESYEEDLEGILAKVGDEYSDVFLAAKNVYDAVELSTILADSDKKSHAKLSSSMIVRFTEHQEDLKKFKRFIRENCPDEYDNLFKNEQKDGYAGYIAHAVSQLKFYQYVKKIIQDIAGAEYFLEKIAQENFLRKQRTFDNGVIPHQIHLAELQAIIHRQAAYYPFLKENQEKIEQLVTFRIPYYVGPLSKGDASTFAWLKRQSEEPIRPWNLQETVDLDQSATAFIERMTNFDTYLPSEKVLPKHSLLYEKFMVFNELTKISYTDDRGIKANFSGKEKEKIFDYLFKTRRKVKKKDIIQFYRNEYNTEIVTLSGLEEDQFNASFSTYQDLLKCGLTRAELDHPDNAEKLEDIIKILTIFEDRQRIRTQLSTFKGQFSAEVLKKLERKHYTGWGRLSKKLINGIYDKESGKTILGYLIDDGVSKHYNRNFMQLINDSQLSFKNAIQKAQSSEHEETLSETVNELAGSPAIKKGIYQSLKIVDELVAIMGYAPKRIVVEMARENQTTSTGKRRSIQRLKIVEKAMAEIGSNLLKEQPTTNEQLRDTRLFLYYMQNGKDMYTGDELSLHRLSHYDIDHIIPQSFMKDDSLDNLVLVGSTENRGKSDDVPSKEVVKDMKAYWEKLYAAGLISQRKFQRLTKGEQGGLTLEDKAHFIQRQLVETRQITKNVAGILDQRYNANSKEKKVQIITLKASLTSQFRSIFGLYKVREVNDYHHGQDAYLNCVVATTLLKVYPNLAPEFVYGEYPKFQTFKENKATAKAIIYTNLLRFFTEDEPRFTKDGEILWSNSYLKTIKKELNYHQMNIVKKVEVQKGGFSKESIKPKGPSNKLIPVKNGLDPQKYGGFDSPIVAYTVLFTHEKGKKPLIKQEILGITIMEKTRFEQNPILFLEEKGFLRPRVLMKLPKYTLYEFPEGRRRLLASAKEAQKGNQMVLPEHLLTLLYHAKQCLLPNQSESLAYVEQHQPEFQEILERVVDFAEVHTLAKSKVQQIVKLFEANQTADVKEIAASFIQLMQFNAMGAPSTFKFFQKDIERARYTSIKEIFDATIIYQSTTGLYETRRKVVD

SEQ ID NO: 198 - protein, 1280 aa, synthetic construct
  REGION 1..1280: note = Synthetic Polypeptide
MRLFEEGHTAEDRRLKRTARRRISRRRNRLRYLQAFFEEAMTDLDENFFARLQESFLVPEDKKWHRHPIFAKLEDEVAYHETYPTIYHLRKKLADSSEQADLRLIYLALAHIVKYRGHFLIEGKLSTENTSVKDQFQQFMVIYNQTFVNGESPLPESVLIEEELTEKASRTKKSEKVLQQFPQEKANGLFGQFLKLMVGNKADFKKVFGLEEEAKITYASESYEEDLEGILAKVGDEYSDVFLAAKNVYDAVELSTILADSDKKSHAKLSSSMIVRFTEHQEDLKKFKRFIRENCPDEYDNLFKNEQKDGYAGYIAHAVSQLKFYQYVKKIIQDIAGAEYFLEKIAQENFLRKQRTFDNGVIPHQIHLAELQAIIHRQAAYYPFLKENQEKIEQLVTFRIPYYVGPLSKGDASTFAWLKRQSEEPIRPWNLQETVDLDQSATAFIERMTNFDTYLPSEKVLPKHSLLYEKFMVFNELTKISYTDDRGIKANFSGKEKEKIFDYLFKTRRKVKKKDIIQFYRNEYNTEIVTLSGLEEDQFNASFSTYQDLLKCGLTRAELDHPDNAEKLEDIIKILTIFEDRQRIRTQLSTFKGQFSAEVLKKLERKHYTGWGRLSKKLINGIYDKESGKTILDYLVDDGVSKHYNRNFMQLINDSQLSFKNAIQKAQSSEHEETLSETVNELAGSPAIKKGIYQSLKIVDELVAIMGYAPKRIVVEMARENQTTSTGKRRSIQRLKIVEKAMAEIGSNLLKEQPTTNEQLRDTRLFLYYMQNGKDMYTGDELSLHRLSHYDIDHIIPQSFMKDDSLDNLVLVGSTENRGKSDDVPSKEVVKDMKAYWEKLYAAGLISQRKFQRLTKGEQGGLTLEDKAHFIQRQLVETRQITKNVAGILDQRYNAKSKEKKVQIITLKASLTSQFRSIFGLYKVREVNDYHHGQDAYLNCVVATTLLKVYPNLAPEFVYGEYPKFQTFKENKATAKAIIYTNLLRFFTEDEPRFTKDGEILWSNSYLKTIKKELNYHQMNIVKKVEVQKGGFSKESIKPKGPSNKLIPVKNGLDPQKYGGFDSPVVAYTVLFTHEKGKKPLIKQEILGITIMEKTRFEQNPILFLEEKGFLRPRVLMKLPKYTLYEFPEGRRRLLASAKEAQKGNQMVLPEHLLTLLYHAKQCLLPNQSESLAYVEQHQPEFQEILERVVDFAEVHTLAKSKVQQIVKLFEANQTADVKEIAASFIQLMQFNAMGAPSTFKFFQKDIERARYTSIKEIFDATIIYQSPTGLYETRRKVVD

SEQ ID NO: 199 - protein, 1072 aa, Enterococcus durans
MDEEAKIQLSKESYEEELESLLEKSGEEFRDVFLQAKKVYDAILLSDILSTKKQNSKAKLSLGMIERYDSHKKDLEELKQFVKANLPEKTAIFFKDSSKNGYAGYIDGKTTQEDFYKFLKKELNGIAGSERFMEKVDQENFLLKQRTTANGVIPHQVHLTELKAIIERQKPYYPSLEEARDKMIRLLTFRIPYYVGPLAQGEETSSFAWLERKTPEKVTPWNATEVIDYSASAMKFIQRMINYDTYLPTEKVLPKHSILYQKYTIFNELTKVAYKDERGIKHQFSSKEKREIFKELFQKQRKVTVKKLQQFLSANYNIEDAEILGVDKAFNSSYATYHDFLDLAKPNELLEQPEMNAMFEDIVKILTIFEDREMIRTQLKKYQSVLGDGFFKKLVKKHYTGWGRLSERLINGIRDKKTNKTILDYLIDDDFPYNRNRNFMQLINDDSLSFKEELANELALAGNQSLLEVVEALLGSPAIKKGIWQTLKIVEELIEIIGYNPKNIVVEMARENQRTNRSKPRLKALEEALKSFDSPLLKEQPVDNQALQKDRLYLYYLQNGKDMYTGEALDIDRLSEYDIDHIIPRSFIVDNSIDNKVLVSSKENRLKMDDVPDQKVVIRMRRYWEKLLRANLISERKFAYLTKLELTPEDKARFIQRQLVETRQITKHVAAILDQYFNQPEESKNKGIRIITLKSSLVSQFRKTFGINKVREINNHHHAHDAYLNGVVAIALLKKYPKLEPEFVYGNYTKFNLATENKATAKKEFYSNILRFFEKEEYSYDENGEIFWDKARHIPQIKKVISSHQVNIVKKVEVQTGGFYKETVNPKGKPDKLIQRKAGWDVSKYGGFGSPVVAYAVAFIYEKGKARKKAKAIEGITIMKQSLFEQDPIGFLSNKGYSNVTKFIKLSKYTLYELENGRRRMVASKEAQKANSFILPEKLVTLLYHAQHYDEIAHKESFDYVNDHLSEFREILDQVIDFSNRYTIAAKNTEKIAELFEQNQESTVQSLSQSFINLMQLNAMGAPADFKFFDVIIPRKRYPSLTEIWESTIIYQSITGLRETRTRMATLWDGEQ

SEQ ID NO: 200 - protein, 1329 aa, Enterococcus faecalis
MKKDYVIGLDIGTNSVGWAVMTEDYQLVKKKMPIYGNTEKKKIKKNFWGVRLFEEGHTAEDRRLKRTARRRISRRRNRLRYLQAFFEEAMTDLDENFFARLQESFLVPEDKKWHRHPIFAKLEDEVAYHETYPTIYHLRKKLADSSEQADLRLIYLALAHIVKYRGHFLIEGKLSTENTSVKEQFQQFMVIYNQTFVNGESPLPESVLIEEELTEKASRTKKSEKVLQQFPQEKANGLFGQFLKLMVGNKADFKKVFGLEEEAKITYASESYEEDLEGILAKVGDEYSDVFLAAKNVYDAVELSTILADSDKKSHAKLSSSMIVRFTEHQEDLKKFKRFIRENCPDEYDNLFKNEQKDGYAGYIAHAVSQLKFYQYVKKIIQDIAGAEYFLEKIAQENFLRKQRTFDNGVIPHQIHLAELQAIIHRQAAYYPFLKENQEKIEQLVTFRIPYYVGPLSKGDASTFAWLKRQSEEPIRPWNLQETVDLDQSATAFIERMTNFDTYLPSEKVLPKHSLLYEKFMVFNELTKISYTDDRGIKANFSGKEKEKIFDYLFKTRRKVKKKDIIQFYRNEYNTEIVTLSGLEEDQFNASFSTYQDLLKCGLTRAELDHPDNAEKLEDIIKILTIFEDRQRIRTQLSTFKGQFSAEVLKKLERKHYTGWGRLSKKLINGIYDKESGKTILDYLVDDGVSKHYNRNFMQLINDSQLSFKNAIQKAQSSEHEETLSETVNELAGSPAIKKGIYQSLKIVDELVAIMGYAPKRIVVEMARENQTTSTGKRRSIQRLKIVEKAMAEIGSNLLKEQPTTNEQLRDTRLFLYYMQNGKDMYTGDELSLHRLSHYDIDHIIPQSFMKDDSLDNLVLVGSTENRGKSDDVPSKKVVKKMKAYWEKLYAAGLISQRKFQRLTKGEQGGLTLEDKAHFIQRQLVETRQITKNVAGILDQRYNAKSKEKKVQIITLKASLTSQFRSIFGLYKVREVNDYHHGQDAYLNCVVATTLLKVYPNLAPEFVYGEYPKFQAFKENKATAKTIIYTNLMRFFTEDEPRFTKDSEILWSNSYLKTIKKELNYHQMNIVKKVEVQKGGFSKESIKPKGPSNKLIPVKNGLDPQKYGGFDSPVVAYTVLFTHEKGKKPLIKQEILGITIMEKTRFEQNPILFLEEKGFLRPRVLMKLPKYTLYEFPEGRRRLLASAKEAQKGNQMVLPEHLLTLLYHAKQCLLPNQSESLAYVEQHQPEFQEILERVVDFAEVHTLAKSKVQQIVKLFEANQTADVKEIAASFIQLMQFNAMGAPSTFKFFQKDIERARYTSIKEIFDATIIYQSTTGLYETRRKVVD

SEQ ID NO: 201 - protein, 1329 aa, Enterococcus faecalis
MKKDYVIGLDIGTNSVGWAVMTEDYQLVKKKMPIYGNTEKKKIKKNFWGVRLFEEGHTAEDRRLKRTARRRISRRRNRLRYLQAFFEEAMTALDENFFARLQESFLVPEDKKWHRHPIFAKLEDEVAYHETYPTIYHLRKKLADSSEQADLRLIYLALAHIVKYRGHFLIEGKLSTENISVKEQFQQFMIIYNQTFVNGESPLPESVLIEEELTEKASRTKKSEKVLQQFPQEKANGLFGQFLKLMVGNKADFKKVFGLEEEAKITYASESYEEDLEGILAKVGDEYSDVFLAAKNVYDAVELSTILADSDKKSHAKLSSSMIVRFTEHQEDLKNFKRFIRENCPDEYDNLFKNEQKDGYAGYITHAVSQLKFYQYVKKIIQDIAGAEYFLEKIAQENFLRKQRTFDNGVIPHQIHLAELQAIIHRQAAYYPFLKENQEKIEQLVTFRIPYYVGPLSKGDANTFAWLKRQSEEPIRPWNLQETVDLDQSATAFIERMTNFDTYLPSEKVLPKHSLLYEKFMVFNELTKISYTDDRGIKANFSGKEKEKIFDYLFKTRRKVKKKDIIQFYRNEYNTEIVTLSGLEEDQFNASFSTYQDLLKCGLTRAELDHPDNAEKLEDIIKILTIFEDRQRIRTQLSTFKGQFSAEVLKKLERKHYTGWGRLSKKLINGIYDKESGKTILDYLIDDGVSKHYNRNFMQLINDSQLSFKNAIQKAQSSEHEETLSETVNELAGSPAIKKGIYQSLKIVDELVAIMGYAPKRIVVEMARENQTTSTGKRRSIQRLKIVEKAMAEIGSNLLKEQPTTNEQLRDTRLFLYYMQNGKDMYTGDELSLHRLSHYDIDHIIPQSFMKDDSLDNLVLVGSTENRGKSDDVPSKEVVKDMKAYWEKLYAAGLISQRKFQRLTKGEQGGLTLEDKAHFIQRQLVETRQITKNVAGILDQRYNAKSKEKKVQIITLKASLTSQFRSIFGLYKVREVNDYHHGQDAYLNCVVATTLLKVYPNLAPEFVYGEYPKFQTFKENKATAKAIIYTNLLRFFTEDEPRFTKDGEILWSNSYLKTIKKELNYHQMNIVKKVEVQKGGFSKESIKPKGPSNKLIPVKNGLDPQKYGGFDSPIVAYTVLFTHEKGKKPLIKQEILGITIMEKTRFEQNPILFLEEKGFLRPRVLMKLPKYTLYQFPEGRRRLLASAKEAQKGNQMVLPEHLLTLLYHAKQCLLPNQSESLAYVEQHQPEFQEILERVVDFAEVHTLAKSKVQQIVKLFEANQTADVKEIAASFIQLMQFNAMGAPSTFKFFQKDIERARYTSIKEIFDATIIYQSTTGLYETRRKVVD

SEQ ID NO: 202 - protein, 1329 aa, Enterococcus faecalis
MKKDYVIGLDIGTNSVGWAVMTEDYQLVKKKMPIYGNTEKKKIKKNFWGVRLFEEGHTAEDRRLKRTARRRISRRRNRLRYLQAFFEEAMTALDENFFARLQESFLVPEDKKWHRHPIFAKLEDEVAYHETYPTIYHLRKKLADSSEQADLRLIYLALAHIVKYRGHFLIEGKLSTENISVKEQFQQFMIIYNQTFVNGESPLPESVLIEEELTEKASRTKKSEKVLQQFPQEKANGLFGQFLKLMVGNKADFKKVFGLEEEAKITYASESYEEDLEGILAKVGDEYSDVFLAAKNVYDAVELSTILADSDKKSHAKLSSSMIVRFTEHQEDLKNFKRFIRENCPDEYDNLFKNEQKDGYAGYITHAVSQLKFYQYVKKIIQDIAGAEYFLEKIAQENFLRKQRTFDNGVIPHQIHLAELQAIIHRQAAYYPFLKENQEKIEQLVTFRIPYYVGPLSKGDASTFAWLKRQSEEPIRPWNLQETVDLDQSATAFIERMTNFDTYLPSEKVLPKHSLLYEKFMVFNELTKISYTDDRGIKANFSGKEKEKIFDYLFKTRRKVKKKDIIQFYRNEYNTEIVTLSGLEEDQFNASFSTYQDLLKCGLTRAELDHPDNAEKLEDIIKILTIFEDRQRIRTQLSTFKGQFSAEVLKKLERKHYTGWGRLSKKLINGIYDKESGKTILDYLVDDGVSKHYNRNFMQLINDSQLSFKNAIQKAQSSEHEETLSETVNELAGSPAIKKGIYQSLKIVDELVAIMGYAPKRIVVEMARENQTTSTGKRRSIQRLKIVEKAMAEIGSNLLKEQPTTNEQLRDTRLFLYYMQNGKDMYTGDELSLHRLSHYDIDHIIPQSFMKDDSLDNLVLVGSTENRGKSDDVPSKEVVKDMKAYWEKLYAAGLISQRKFQRLTKGEQGGLTLEDKAHFIQRQLVETRQITKNVAGILDQRYNAKSKEKKVQIITLKASLTSQFRSIFGLYKVREVNDYHHGQDAYLNCVVATTLLKVYPNLAPEFVYGEYPKFQTFKENKATAKAIIYTNLLRFFTEDEPRFTKDGEILWSNSYLKTIKKELNYHQMNIVKKVEVQKGGFSKESIKPKGPSNKLIPVKNGLDPQKYGGFDSPIVAYTVLFTHEKGKKPLIKQEILGITIMEKTRFEQNPILFLEEKGFLRPRVLMKLPKYTLYEFPEGRRRLLASAKEAQKGNQMVLPEHLLTLLYHAKQCLLPNQSESLAYVEQHQPEFQEILERVVDFAEVHTLAKSKVQQIVKLFEANQTADVKEIAASFIQLMQFNAMGAPSTFKFFQKDIERARYTSIKEIFDATIIYQSTTGLYETRRKVVD

SEQ ID NO: 203 - protein, 1329 aa, Enterococcus faecalis
MKKDYVIGLDIGTNSVGWAVMTEDYQLVKKKMPIYGNTEKKKIKKNFWGVRLFEEGHTAEDRRLKRTARRRISRRRNRLRYLQAFFEEAMTDLDENFFARLQESFLVPEDKKWHRHPIFAKLEDEVAYHETYPTIYHLRKKLADSSEQADLRLIYLALAHIVKYRGHFLIEGKLSTENISVKEQFQQFMIIYNQTFVNGESPLPESVLIEEELTEKASRTKKSEKVLQQFPQEKANGLFGQFLKLMVGNKADFKKVFGLEEEAKITYASESYEEDLEGILAKVGDEYSDVFLAAKNVYDAVELSTILADSDKKSHAKLSSSMIVRFTEHQEDLKKFKRFIRENCPDEYDNLFKNEQKDGYAGYIAHAVSQLKFYQYVKKIIQDIAGAEYFLEKIAQENFLRKQRTFDNGVIPHQIHLAELQAIIHRQAAYYPFLKENQEKIEQLVTFRIPYYVGPLSKGDASTFAWLKRQSEEPIRPWNLQETVDLDQSATAFIERMTNFDTYLPSEKVLPKHSLLYEKFMVFNELTKISYTDDRGIKANFSGKEKEKIFDYLFKTRRKVKKKDIIQFYRNEYNTEIVTLSGLEEDQFNASFSTYQDLLKCGLTRAELDHPDNAEKLEDIIKILTIFEDRQRIRTQLSTFKGQFSAEVLKKLERKHYTGWGRLSKKLINGIYDKESGKTILDYLVDDGVSKHYNRNFMQLINDSQLSFKNAIQKAQSSEHEETLSETVNELAGSPAIKKGIYQSLKIVDELVAIMGYAPKRIVVEMARENQTTSTGKRRSIQRLKIVEKAMAEIGSNLLKEQPTTNEQLRDTRLFLYYMQNGKDMYTGDELSLHRLSHYDIDHIIPQSFMKDDSLDNLVLVGSTENRGKSDDVPSKEVVKDMKAYWEKLYAAGLISQRKFQRLTKGEQGGLTLEDKAHFIQRQLVETRQITKNVAGILNQRYNANSKEKKVQIITLKASLTSQFRSIFGLYKVREVNDYHHGQDAYLNCVVATTLLKVYPNLAPEFVYGEYPKFQTFKENKATAKAIIYTNLLRFFTEDEPRFTKDGEILWSNSYLKTIKKELNYHQMNIVKKVEVQKGGFSKESIKPKGPSNKLIPVKNGLDPQKYGGFDSPVVAYTVLFTHEKGKKPLIKQEILGITIMEKTRFEQNPILFLEEKGFLRPRVLMKLPKYTLYEFPEGRRRLLASAKEAQKGNQMVLPEHLLTLLYHAKQCLLPNQSESLAYVEQHQPEFQEILERVVDFAEVHTLAKSKVQQIVKLFEANQTADVKEIAASFIQLMQFNAMGAPSTFKFFQKDIERARYTSIKEIFDATIIYQSTTGLYETRRKVVD

SEQ ID NO: 204 - protein, 1331 aa, Enterococcus faecalis
MKKDYVIGLDIGTNSVGWAVMTEDYQLVKKKMPIYGNTEKKKIKKNFWGVRLFEEGHTAEDRRLKRTARRRISRRRNRLRYLQAFFEEAMTALDENFFARLQESFLVPEDKKWHRHPIFAKLEDEVAYHETYPTIYHLRKKLADSSEQADLRLIYLALAHIVKYRGHFLIEGKLSTENISVKEQFQQFMIIYNQTFVNGESPLPESVLIEEELTEKASRTKKSEKVLQQFPQEKANGLFGQFLKLMVGNKADFKKVFGLEEEAKIKITYASESYEEDLEGILAKVGDEYSDVFLAAKNVYDAVELSTILADSDKKSHAKLSSSMIVRFTEHQEDLKNFKRFIRENCPDEYDNLFKNEQKDGYAGYIAHAVSQLKFYQYVKKIIQDIAGAEYFLEKIAQENFLRKQRTFDNGVIPHQIHLAELQAIIHRQAAYYPFLKENQKKIEQLVTFRIPYYVGPLSKGDASTFAWLKRQSEEPIRPWNLQETVDLDQSATAFIERMTNFDTYLPSEKVLPKHSLLYEKFMVFNELTKISYTDDRGIKANFSGKEKEKIFDYLFKTRRKVKKKDIIQFYRNEYNTEIVTLSGLEEDQFNASFSTYQDLLKCGLTRAELDHPDNAEKLEDIIKILTIFEDRQRIRTQLSTFKGQFSEEVLKKLERKHYTGWGRLSKKLINGIYDKESGKTILDYLIDDGVSKHYNRNFMQLINDSQLSFKNAIQKAQSSEHEETLSETVNELAGSPAIKKGIYQSLKIVDELVAIMGYAPKRIVVEMARENQTTSTGKRRSIQRLKIVEKAMAEIGSNLLKEQPTTNEQLRDTRLFLYYMQNGKDMYTGDELSLHRLSHYDIDHIIPQSFMKDDSLDNLVLVGSTENRGKSDDVPSKEVVKKMKAYWEKLYAAGLISQRKFQRLTKGEQGGLTLEDKAHFIQRQLVETRQITKNVAGILDQRYNAKSKEKKVQIITLKASLTSQFRSIFGLYKVREVNDYHHGQDAYLNCVVATTLLKVYPNLAPEFVYGEYPKFQAFKENKATAKAIIYTNLLRFFTEDEPRFTKDGEILWSNSYLKTIKKELNYHQMNIVKKVEVQKGGFSKESIKPKGPSNKLIPVKNGLDPQKYGGFDSPVVAYTVLFTHEKGKKPLIKQEILGITIMEKTRFEQNPILFLEEKGFLRPRVLMKLPKYTLYEFPEGRRRLLASAKEAQKGNQMVLPEHLLTLLYHAKQCLLPNQSESLAYVEQHQPEFQEILERVVDFAEVHTLAKSKVQQIVKLFEANQTADVKEIAASFIQLMQFNAMGAPSTFKFFQKDIERARYTSIKEIFDATIIYQSTTGLYETRRKVVD

SEQ ID NO: 205 - protein, 1329 aa, Enterococcus faecalis
MKKDYVIGLDIGTNSVGWAVMTEDYQLVKKKMPIYGNTEKKKIKKNFWGVRLFEEGHTAEDRRLKRTARRRISRRRNRLRYLQAFFEEAMTALDENFFARLQESFLVPEDKKWHRHPIFAKLEDEVAYHETYPTIYHLRKKLADSSEQADLRLIYLALAHIVKYRGHFLIEGKLSTENISVKEQFQQFMIIYNQTFVNGESPLPESVLIEEELTEKASRTKKSEKVLQQFPQEKANGLFGQFLKLMVGNKADFKKVFGLEEEAKITYASESYEEDLEGILAKVGDEYSDVFLAAKNVYDAVELSTILADSDKKSHAKLSSSMIVRFTEHQEDLKKFKRFIRENCPDEYDNLFKNEQKDGYAGYIAHAVSQLKFYQYVKKIIQDIAGAEYFLEKIAQENFLRKQRTFDNGVIPHQIHLAELQAIIHRQAAYYPFLKENQEKIEQLVTFRIPYYVGPLSKGDASTFAWLKRQSEEPIRPWNLQETVDLDQSATAFIERMTNFDTYLPSEKVLPKHSLLYEKFMVFNELTKISYTDDRGIKANFSGKEKEKIFDYLFKTRRKVKKKDIIQFYRNEYNTEIVTLSGLEEDQFNASFSTYQDLLKCGLTRAELDHPDNAEKLEDIIKILTIFEDRQRIRTQLSTFKGQFSAEVLKKLERKHYTGWGRLSKKLINGIYDKESGKTILGYLIDDGVSKHYNRNFMQLINDSQLSFKNAIQKAQSSEHEETLSETVNELAGSPAIKKGIYQSLKIVDELVAIMGYAPKRIVVEMARENQTTSTGKRRSIQRLKIVEKAMAEIGSNLLKEQPTTNEQLRDTRLFLYYMQNGKDMYTGDELSLHRLSHYDIDHIIPQSFMKDDSLDNLVLVGSTENRGKSDDVPSKEVVKDMKAYWEKLYAAGLISQRKFQRLTKGEQGGLTLEDKAHFIQRQLVETRQITKNVAGILDQRYNAKSKEKKVQIITLKASLTSQFRSIFGLYKVREVNDYHHGQDAYLNCVVATTLLKVYPNLAPEFVYGEYPKFQTFKENKATAKAIIYTNLLRFFTEDEPRFTKDGEILWSNSYLKTIKKELNYHQMNIVKKVEVQKGGFSKESIKPKGPSNKLIPVKNGLDPQKYGGFDSPIVAYTVLFTHEKGKKPLIKQEILGITIMEKTRFEQNPILFLEEKGFLRPRVLMKLPKYTLYEFPEGRRRLLASAKEAQKGNQMVLPEHLLTLLYHAKQCLLPNQSESLAYVEQHQPEFQEILERVVDFAEVHTLAKSKVQQIVKLFEANQTADVKEIAASFIQLMQFNAMGAPSTFKFFQKDIERARYTSIKEIFDATIIYQSTTGLYETRRKVVD

SEQ ID NO: 206 - protein, 1329 aa, Enterococcus faecalis
MKKDYVIGLDIGSNSVGWAVMTEDYQLVKKKMPIYGNTEKKKIKKNFWGVRLFEEGHTAEDRRLKRTARRRISRRRNRLRYLQAFFEEAMTDLDENFFARLQESFLVPEDKKWHRHPIFAKLEDEVAYHETYPTIYHLRKKLADSSEQADLRLIYLALAHIVKYRGHFLIEGKLSTENTSVKDQFQQFMVIYNQTFVNGESPLPESVLIEEELTEKASRTKKSEKVLQQFPQEKANGLFGQFLKLMVGNKADFKKVFGLEEEAKITYASESYEEDLEGILAKVGDEYSDVFLAAKNVYDAVELSTILADSDKKSHAKLSSSMIVRFTEHQEDLKNFKRFIRENCPDEYDNLFKNEQKDGYAGYITHAVSQLKFYQYVKKIIQDIAGAEYFLEKIAQENFLRKQRTFDNGVIPHQIHLAELQAIIHRQAAYYPFLKENQEKIEQLVTFRIPYYVGPLSKGDASTFAWLKRQSEEPIRPWNLQETVDLDQSATAFIERMTNFDTYLPSEKVLPKHSLLYEKFMVFNELTKISYTDDRGIKANFSGKEKEKIFDYLFKTRRKVKKKDIIQFYRNEYNTEIVTLSGLEEDQFNASFSTYQDLLKCGLTRAELDHPDNAEKLEDIIKILTIFEDRQRIRTQLSTFKGQFSAEVLKKLERKHYTGWGRLSKKLINGIYDKESGKTILDYLIDDGVSKHYNRNFMQLINDSQLSFKNAIQKAQSSEHEETLSETVNELAGSPAIKKGIYQSLKIVDELVAIMGYAPKRIVVEMARENQTTSTGKRRSIQRLKIVEKAMAEIGSNLLKEQPTTNEQLRDTRLFLYYMQNGKDMYTGDELSLHRLSHYDIDHIIPQSFMKDDSLDNLVLVGSTENRGKSDDVPSKEVVKDMKAYWEKLYAAGLISQRKFQRLTKGEQGGLTLEDKAHFIQRQLVETRQITKNVAGILDQLYNAKSKEKKVQIITLKASLTSQFRSIFGLYKVREVNDYHHGQDAYLNCVVATTLLKVYPNLAPEFVYGEYPKFQTFKENKATAKTIIYTNLMRFFTEDEPRFTKDGEILWSNSYLKTIKKELNYHQMNIVKKVEVQKGGFSKESIKPKGPSNKLIPVKNGLDPQKYGGFDSPVVAYTVLFTHEKGKKPLIKQEILGITIMEKTRFEQNPILFLEEKGFLRPRVLMKLPKYTLYEFPEGRRRLLASAKEAQKGNQMVLPEHLLTLLYHAKQCLLPNQSESLAYVEQHQPEFQEILERVVDFAEVHTLAKSKVQQIVKLFEANQTADVKEIAASFIQLMQFNAMGAPSTFKFFQKDIERARYTSIKEIFDATIIYQSTTGLYETRRKVVD

SEQ ID NO: 207 - protein, 1329 aa, Enterococcus faecalis
MKKDYVIGLDIGTNSVGWAVMTEDYQLVKKKMPIYGNTEKKKIKKNFWGVRLFEEGHTAEDRRLKRTARRRISRRRNRLRYLQAFFEEAMTALDENFFARLQESFLVPEDKKWHRHPIFAKLEDEVAYHETYPTIYHLRKKLADSSEQADLRLIYLALAHIVKYRGHFLIEGKLSTENISVKEKFQQFMIIYNQTFVNGEGPLPESVLIEEELTEKASRTKKSEKVLQQFPQEKANGLFGQFLKLMVGNKADFKKVFGLEEEAKITYASESYEEDLEGILAKVGDEYSDVFLAAKNVYDAVELSTILADSDKKSYAKLSSSMIVRFTEHQEDLKKFKRFIRENCPDEYDNLFKNEQKDGYAGYIAHAVSQLKFYQYVKKIIQDIAGAEYFLEKIAQENFLRKQRTFDNGVIPHQIHLAELQAIIHRQAAYYPFLKENQEKIEQLVTFRIPYYVGPLSKGDASTFAWLKRQSEEPIRPWNLQETVDLDQSATAFIERMTNFDTYLPSEKVLPKHSLLYEKFMVFNELTKISYTDDRGIKANFSGKEKEKIFDYLFKTRRKVKKKDIIQFYRNEYNTEIVTLSGLEEDQFNASFSTYQDLLKCGLTRAELDHPDNAEKLEDIIKILTIFEDRQRIRTQLSTFKGQFSAEVLKKLERKHYTGWGRLSKKLINGIYDKESGKTILDYLVDDGVSKHYNRNFMQLINDSQLSFKNAIQKAQSSEHEETLSETVNELAGSPAIKKGIYQSLKIVDELVAIMGYAPKRIVVEMARENQTTSTGKRRSIQRLKIVEKAMAEIGSNLLKEQPTTNEQLRDTRLFLYYMQNGKDMYTGDELSLHRLSHYDIDHIIPQSFMKDDSLDNLVLVGSTENRGKSDDVPSKEVVKDMKAYWEKLYAAGLISQRKFQRLTKGEQGGLTLEDKAHFIQRQLVETRQITKNVAGILDQRYNAKSKEKKVQIITLKASLTSQFRSIFGLYKVREVNDYHHGQDAYLNCVVATTLLKVYPNLAPEFVYGEYPKFQTFKENKATAKAIIYTNLLRFFTEDEPRFTKDGEILWSNSYLKTIKKELNYHQMNIVKKVEVQKGGFSKESIKPKGPSNKLIPVKNGLDPQKYGGFDSPIVAYTVLFTHEKGKKPLIKQEILGITIMEKTRFEQNPILFLEEKGFLRPRVLMKLPKYTLYEFPEGRRRLLASAKEAQKGNQMVLPEHLLTLLYHAKQCLLPNQSESLAYVEQHQPEFQEILERVVDFAEVHTLAKSKVQQIVKLFEANQTADVKEIAASFIQLMQFNAMGAPSTFKFFQKDIERARYTSIKEIFDATIIYQSTTGLYETRRKVVD

SEQ ID NO: 208 - protein, 1329 aa, Enterococcus faecalis
MKKDYVIGLDIGTNSVGWAVMTEDYQLVKKKMPIYGNTEKKKIKKNFWGVRLFEEGHTAEDRRLKRTARRRISRRRNRLRYLQAFFEEAMTALDENFFARLQESFLVPEDKKWHRHPIFAKLEDEVAYHETYPTIYHLRKKLADSSEQADLRLIYLALAHIVKYRGHFLIEGKLSTENISVKDQFQQFMVIYNQTFVNGESPLPESVLIEEELTEKASRTKKSEKVLQQFPQEKANGLFGQFLKLMVGNKADFKKVFGLEEEAKITYASESYEEDLEGILAKVGDEYSDVFLAAKNVYDAVELSTILADSDKKSHAKLSSSMIVRFTEHQEDLKNFKRFIRENCPDEYDNLFKNEQKDGYAGYIAHAVSQLKFYQYVKKIIQDIAGAEYFLEKIAQENFLRKQRTFDNGVIPHQIHLAELQAIIHRQAAYYPFLKENQKKIEQLVTFRIPYYVGPLSKGDASTFAWLKRQSEEPIRPWNLQETVDLDQSATAFIERMTNFDTYLPSEKVLPKHSLLYEKFMVFNELTKISYTDDRGIKANFSGKEKEKIFDYLFKTRRKVKKKDIIQFYRNEYNTEIVTLSGLEEDQFNASFSTYQDLLKCGLTRAELDHPDNAEKLEDIIKILTIFEDRQRIRTQLSTFKGQFSAEVLKKLERKHYTGWGRLSKKLINGIYDKESGKTILDYLIDDGVSKHYNRNFMQLINDSQLSFKNAIQKAQSSEHEETLSETVNELAGSPAIKKGIYQSLKIVDELVAIMGYAPKRIVVEMARENQTTSTGKRRSIQRLKIVEKAMAEIGSNLLKEQPTTNEQLRDTRLFLYYMQNGKDMYTGDELSLHRLSHYDIDHIIPQSFMKDDSLDNLVLVGSTENRGKSDDVPSKEVVKKMKAYWEKLYAAGLISQRKFQRLTKGEQGGLTLEDKAHFIQRQLVETRQITKNVAGILDQRYNAKSKEKKVQIITLKASLTSQFRSIFGLYKVREVNDYHHGQDAYLNCVVATTLLKVYPNLAPEFVYGEYPKFQAFKENKAMAKAIIYTNLLRFFTEDEPRFTKDGEILWSNSYLKTIKKELNYHQMNIVKKVEVQKGGFSKESIKPKGPSNKLIPVKNGLDPQKYGGFDSPVVAYTVLFTHEKGKKPLIKQEILGITIMEKTRFEQNPILFLEEKGFLRPRVLMKLPKYTLYEFPEGRRRLLASAKEAQKGNQMVLPERLLTLLYHAKQCLLPNQSESLAYVEQHQPEFQEILERVVDFAEVHTLAKSKVQQIVKLFEANQTADVKEIAASFIQLMQFNAMGAPSTFKFFQKDIERARYTSIKEIFDATIIYQSTTGLYETRRKVVD

SEQ ID NO: 209 - protein, 1329 aa, Enterococcus faecalis
MKKDYVIGLDIGTNSVGWAVMTEDYQLVKKKMPIYGNTEKKKIKKNFWGVRLFEEGHTAEDRRLKRTARRRISRRRNRLRYLQAFFEEAMTALDENFFARLQESFLVPEDKKWHRHPIFAKLEDEVAYHETYPTIYHLRKKLADSSEQADLRLIYLALAHIVKYRGHFLIEGKLSTENISVKEQFQQFMIIYNQTFVNGESPLPESVLIEEELTEKASRTKKSEKVLQQFPQEKANGLFGQFLKLMVGNKADFKKVFGLEEEAKITYASESYEEDLEGILAKVGDEYSDVFLAAKNVYDAVELSTILADSDKKSHAKLSSSMIVRFTEHQEDLKKFKRFIRENCPDEYDNLFKNEQKDGYAGYIAHAVSQLKFYQYVKKIIQDIAGAEYFLEKIAQENFLRKQRTFDNGVIPHQIHLAELQAIIHRQAAYYPFLKENQEKIEQLVTFRIPYYVGPLSKGDASTFAWLKRQNEKPIRPWNLQETVDLDQSATAFIERMTNFDTYLPSEKVLPKHSLLYEKFMVFNELTKISYTDDRGIKANFSGKEKEKIFDYLFKTRRKVKKKDIIQFYRNEYNTEIVTLSGLEEDQFNASFSTYQDLLKCGLTRAELDHPDNAEKLEDIIKILTIFEDRQRIRTQLSTFKGQFSAEVLKKLERKHYTGWGRLSKKLINGIYDKESGKTILDYLIDDGVSKHYNRNFMQLINDSQLSFKNAIQKAQSSEHEETLSETVNELAGSPAIKKGIYQSLKIVDELVAIMGYAPKRIVVEMARENQTTSTGKRRSIQRLKIVEKAMAEIGSNLLKEQPTTNEQLRDTRLFLYYMQNGKDMYTGDELSLHRLSHYDIDHIIPQSFMKDDSLDNLVLVGSTENRGKSDDVPSKEVVKKMKAYWEKLYAAGLISQRKFQRLTKGEQGGLTLEDKAHFIQRQLVETRQITKNVAGILDQRYNAKSKEKKVQIITLKASLTSQFRSIFGLYKVREVNDYHHGQDAYLNCVVATTLLKVYPNLAPEFVYGEYPKFQAFKENKATAKAIIYTNLMRFFTEVEPRFTKDGEILWSNSYLKTIKKELNYHQMNIVKKVEVQKGGFSKESIKPKGPSNKLIPVKNGLDPQKYGGFDSPVVAYTVLFTHEKGKKPLIKQEILGITIMEKTKFEQNPILFLEEKGFLRPRVLMKLPKYTLYEFPEGRRRLLASAKEAQKGNQMVLPEHLLTLLYHAKQCLLPNQSESLAYVEQHQPEFQEILERVVDFAEVHTLAKSKVQQIVKLFETNQTADVKEIAASFIQLMQFNAMGAPSTFKFFQKDIERARYTSIKEIFDATIIYQSTTGLYETRRKVVD

SEQ ID NO: 210 - protein, 1329 aa, Enterococcus faecalis
MKKDYVIGLDIGTNSVGWAVMTEDYQLVKKKMPIYGNTEKKKIKKNFWGVRLFEEGHTAEDRRLKRTARRRISRRRNRLRYLQAFFEEAMTALDENFFARLQESFLVPEDKKWHRHPIFAKLEDEVAYHETYPTIYHLRKKLADSSEQADLRLIYLALAHIVKYRGHFLIEGKLSTENISVKEQFQQFMIIYNQTFVNGESPLPESVLIEEELTEKASRTKKSEKVLQQFPQEKANGLFGQFLKLMVGNKADFKKVFGLEEEAKITYASESYEEDLEGILAKVGDEYSDVFLAAKNVYDAVELSTILADSDKKSHAKLSSSMIVRFTEHQEDLKNFKRFIRENCPDEYDNLFKNEQKDGYAGYIAHAVSQLKFYQYVKKIIQDIAGAEYFLEKIAQENFLRKQRTFDNGVIPHQIHLAELQAIIHRQAAYYPFLKENQKKIEQLVTFRIPYYVGPLSKGDASTFAWLKRQSEEPIRPWNLQETVDLDQSATAFIERMTNFDTYLPSEKVLPKHSLLYEKFMVFNELTKISYTDDRGIKANFSGKEKEKIFDYLFKTRRKVKKKDIIQFYRNEYNTEIVTLSGLEEDQFNASFSTYQDLLKCGLTRAELDHPDNAEKLEDIIKILTIFEDRQRIRTQLSTFKGQFSEEVLKKLERKHYTGWGRLSKKLINGIYDKESGKTILDYLIDDGVSKHYNRNFMQLINDSQLSFKNAIQKAQSSEHEETLSETVNELAGSPAIKKGIYQSLKIVDELVAIMGYAPKRIVVEMARENQTTSTGKRRSIQRLKIVEKAMAEIGSNLLKEQPTTNEQLRDTRLFLYYMQNGKDMYTGDELSLHRLSHYDIDHIIPQSFMKDDSLDNLVLVGSTENRGKSDDVPSKEVVKKMKAYWEKLYAAGLISQRKFQRLTKGEQGGLTLEDKAHFIQRQLVETRQITKNVAGILDQRYNAKSKEKKVQIITLKASLTSQFRSIFGLYKVREVNDYHHGQDAYLNCVVATTLLKVYPNLAPEFVYGEYPKFQAFKENKATAKAIIYTNLLRFFTEDEPRFTKDGEILWSNSYLKTIKKELNYHQMNIVKKVEVQKGGFSKESIKPKGPSNKLIPVKNGLDPQKYGGFDSPVVAYTVLFTHEKGKKPLIKQEILGITIMEKTRFEQNPILFLEEKGFLRPRVLMKLPKYTLYEFPEGRRRLLASAKEAQKGNQMVLPEHLLTLLYHAKQCLLPNQSESLAYVEQHQPEFQEILERVVDFAEVHTLAKSKVQQIVKLFEANQTADVKEIAASFIQLMQFNAMGAPSTFKFFQKDIERARYTSIKEIFDATIIYQSTTGLYETRRKVVD

SEQ ID NO: 211 - protein, 1328 aa, Enterococcus faecium
MKKEYTIGLDIGTNSVGWSVLTDDYRLVSKKMKVAGNTEKSSTKKNFWGVRLFDEGQTAEARRSKRTARRRLARRRQRILELQKIFAPEILKIDEHFFARLNESFLVLDEKKQSRHPVFATIKQEKSYHQTYPTIYHLRQALADSSEKADIRLVYLAMAHLLKYRGHFLIEGELNTENSSVTETFRQFLSTYNQQFSEADKLDEAVDCSFVFTEKMSKTKKAETLLKYFPHEKSNGYLSQFIKLMVGNQGNFKNVFGLEEAKLQFSKETYEEDLEELLEKIGDDYIDLFVQAKNVYDAVLLSEILSDSTKNTRAKLSAGMIRRYDAHKEDLVLLKRFVKENLPKKYRAFFGDNSVNGYAGYIEGHATQEDFYKFVKKELTGIRGSEVFLTKIEQENFLRKQRTFDNGVIPHQIHLTELRAIIANQKKHYPFLKEEQEKLESLLTFKIPYYVGPLAKKQENSPFAWLIRKSEEKIKPWNLPEIVDMEGSAVRFIERMINTDMYMPHNKVLPKNSLLYQKFSIYNELTKVRYQDERGQMNYFSSIEKKEIFHELFEKNRKVTKKDLQEFLYLKYDIKHAELSGIEKAFNASYTTYHDFLTMSENKQWLEDPELASMFEEIIKTLTVFEDREMIKTRLSHHEATLGKHIIKKLTKKHYTGWGRLSKELIQGIRDKQSNKTILDYLIDDDFPHHRNRNFMQLINDDSLSFKKEIKKAQMITDTENLEEIVKELTGSPAIKKGILQSLKIVDEIVGIMGYEPANIVVEMARENQTTGRGLKSSRPRLKALEESLKDFGSQLLKEYPTDNSSLQKDRLYLYYLQNGRDMYTGAPLDIHRLSDYDIDHIIPRSFTTDNSIDNKVLVSSKENRLKKDDVPSEKVVKKMRSFWYDLYSSKLISKRKLDNLTKIKLTEEDKAGFIKRQLVETRQITKHVAGILHHRFNKAEDTNEPIRKVRIITLKSALVSQFRNRFGIYKVREINEYHHAHDAYLNGVVALALLKKYPQLAPEFVYGEYLKFNAHKANKATVKKEFYSNIMKFFESDTPVCDENGEIFWDKSKSIAQVKKVINHHHMNIVKKTEIQKGGFSKETVEPKKDSSKLLPRKNNWDPAKYGGLGSPNVAYTVAFTYEKGKARKRTNALEGITIMEREAFEQSPVLFLKNKGYEQAEIEMKLPKYALFELENGRKRMVASKEAQKANSFLLPEHLVTLLYHAKQYDEISHKESFDYVNEHHKEFSEVFARVLEFAGKYTLAEKNIEKLEKIYKENQTDDLAKLASSFVNLMQFNAMGAPADFKFFDVTIPRKRYTSLTEIWQSTIIHQSITGLYETRIRMGK

SEQ ID NO: 212 - protein, 1329 aa, Enterococcus faecium
MKKEYTIGLDIGTNSVGWSVLTDDYRLVSKKMKVAGNTEKSSTKKNFWGVRLFDEGQTAEARRSKRTARRRLARRRQRILELQKIFAPEILKIDEHFFARLNESFLVPDEKKQSRHPVFATIKQEKSYHQTYPTIYHLRQALADSSEKADIRLVYLAMAHLLKYRGHFLIEGELNTENSSVTETFRQFLSTYNQQFSEAGKLDEAVDCSFVFTEKMSKTKKAETLLKYFPHEKSNGYLSQFIKLMVGNQGNFKNVFGLEEEAKLQFSKETYEEDLEELLEKIGDDYIDLFVQAKNVYDAVLLSEILSDSTKNTRAKLSAGMIRRYDAHKEDLVLLKRFVKENLPKKYRAFFGDNSVNGYAGYIEGHATQEAFYKFVKKELTGIRGSEVFLTKIEQENFLRKQRTFDNGVIPHQIHLSELRAIIANQKKHYPFLKEEQEKLESLLTFKIPYYVGPLAKKQENSPFAWLIRKSEEKIKPWNLPEIVDMEGSAVRFIERMINTDMYMPHNKVLPKNSLLYQKFSIYNELTKVRYQDERGQMNYFSSIEKKEIFHELFEKNRKVTKKDLQEFLYLKYDIKHAELSGIEKAFNASYTTYHDFLTMSENKQWLEDPELASMFEEIIKTLTVFEDREMIKTRLSHHEATLGKHIIKKLTKKHYTGWGRLSKELIQGIRDKQSNKTILDYLIDDDFPHHRNRNFMQLINDDSLSFKKEIKKAQMITDTENLEEIVKELTGSPAIKKGILQSLKIVDEIVGIMGYEPANIVVEMARENQTTGRGLKSSRPRLKALEESLKDFGSQLLKEYPTDNSSLQKDRLYLYYLQNGRDMYTGAPLDIHRLSDYDIDHIIPRSFTTDNSIDNKVLVSSKENRLKKDDVPSEKVVKKMRSFWYDLYSSKLISKRKLDNLTKIKLTEEDKAGFIKRQLVETRQITKHVAGILHHRFNKAEDTNDPIRKVRIITLKSALVSQFRNRFGIYKVREINEYHHAHDAYLNGVVALALLKKYPQLAPEFVYGEYLKFNAHKANKATVKKEFYSNIMKFFESDTPVCDENGEIFWDKSKSIAQVKKVINHHHMNIVKKTEIQKGGFSKETVEPKKDSSKLLPRKNNWDPAKYGGLGSPNVAYTVAFTYEKGKARKRTNALEGITIMEREAFEQSPVLFLKNKGYEQAEIEMKLPKYALFELENGRKRMVASKEAQKANSFLLPEHLVTLLYHAKQYDEISHKESFDYVNEHHKEFSEVFARVLEFAGKYTLAEKNIEKLEKIYKENQTDDLAKLASSFVNLMQFNAMGAPADFKFFDVTIPRKRYTSLTEIWQSTIIHQSITGLYETRIRMGK

SEQ ID NO: 213 - protein, 1329 aa, Enterococcus faecium
MKKEYTIGLDIGTNSVGWSVLTDDYRLVSKKMKVAGNTEKSSTKKNFWGVRLFDEGQTAEARRSKRTARRRLARRRQRILELQKIFAPEILKIDEHFFARLNESFLVLDEKKQSRHPVFATIKQEKSYHQTYPTIYHLRQALADSSEKADIRLVYLAMAHLLKYRGHFLIEGELNTENSSVTETFRQFLSTYNQQFSEADKLDEAVDCSFVFTEKMSKTKKAETLLKYFPHEKSNGYLSQFIKLMVGNQGNFKNVFGLEEEAKLQFSKETYEEDLEELLEKIGDDYIDLFVQAKNVYDAVLLSEILSDSTKNTRAKLSAGMIRRYDAHKEDLVLLKRFVKENLPKKYRAFFGDNSVNGYAGYIEGHATQEDFYKFVKKELTGIRGSEVFLTKIEQENFLRKQRTFDNGVIPHQIHLTELRAIIANQKKHYPFLKEEQEKLESLLTFKIPYYVGPLAKKQENSPFAWLIRKSEEKIKPWNLPEIVDMEGSAVRFIERMNNTDMYIPHNKVLPKNSLLYQKFSIYNELTKVRYQDERGQMNYFSSIEKKEIFHELFEKNRKVTKKDLQEFLYLKYDIKHAELSGIEKAFNASYTTYHDFLTMSENKQWLEDPELASMFEEIIKTLTVFEDREMIKTRLSHHEATLGKHIIKKLTKKHYTGWGRLSKELIQGIRDKQSNKTILDYLIDDDFPHHRNRNFMQLINDDSLSFKKEIKKAQMITDTENLEEIVKELTGSPAIKKGILQSLKIVDEIVGIMGYEPANIVVEMARENQTTGRGLKSSRPRLKALEESLKDFGSQLLKEYPTDNSSLQKDRLYLYYLQNGRDMYTGAPLDIHRLSDYDIDHIIPRSFTTDNSIDNKVLVSSKENRLKKDDVPSEKVVKKMRSFWYDLYSSKLISKRKLDNLTKIKLTEEDKAGFIKRQLVETRQITKHVAGILHHRFNKAEDTNEPIRKVRIITLKSALVSQFRNRFGIYKVREINEYHHAHDAYLNGVVALALLKKYPQLAPEFVYGEYLKFNAHKANKATVKKEFYSNIMKFFESDTPVCDENGEIFWDKSKSIAQVKKVINHHHMNIVKKTEIQKGGFSKETVEPKKDSSKLLPRKNNWDPAKYGGLGSPNVAYTVAFTYEKGKARKRTNALEGITIMEREAFEQSPVLFLKNKGYEQAEIEMKLPKYALFELENGRKRMVASKEAQKANSFLLPEHLVTLLYHAKQYDEISHKESFDYVNEHHKEFSEVFARVLEFAGKYTLAEKNIEKLEKIYKENQTDDLAKLASSFVNLMQFNAMGAPADFKFFDVTIPRKRYTSLTEIWQSTIIHQSITGLYETRIRMGK

SEQ ID NO: 214 - protein, 1329 aa, Enterococcus faecium
MKKEYTIGLDIGTNSVGWSVLTDDYRLVSKKMKVAGNTEKSSTKKNFWGVRLFDEGQTAEARRSKRTARRRLARRRQRILELQKIFAPEILKIDEHFFARLNESFLVLDEKKQSRHPVFATIKQEKSYHQTYPTIYHLRQALADSSEKADIRLVYLAMAHLLKYRGHFLIEGELNTENSSVTETFRQFLSTYNQQFSEADKLDEAVDCSFVFTEKMSKTKKAETLLKYFPHEKSNGYLSQFIKLMVGNQGNFKNVFGLEEEAKLQFSKETYEEDLEELLEKIGDDYIDLFVQAKNVYDAVLLSEILSDSTKNTRAKLSAGMIRRYDAHKEDLVLLKRFVKENLPKKYRAFFGDNSVNGYAGYIEGHATQEDFYKFVKKELTGIRGSEVFLTKIEQENFLRKQRTFDNGVIPHQIHLTELRAIIANQKKHYPFLKEEQEKLESLLTFKIPYYVGPLAKKQENSPFAWLIRKSEEKIKPWNLPEIVDMEGSAVRFIERMINTDMYIPHNKVLPKNSLLYQKFSIYNELTKVRYQDERGQMNYFSSIEKKEIFHELFEKNRKVTKKDLQEFLYLKYDIKHAELSGIEKAFNASYTTYHDFLTMSENKQWLEDPELASMFEEIIKTLTVFEDREMIKTRLSHHEATLGKHIIKKLTKKHYTGWGRLSKELIQGIRDKQSNKTILDYLIDDDFPHHRNRNFMQLINDDSLSFKKEIKKAQMITDTENLEEIVKELTGSPAIKKGILQSLKIVDEIVGIMGYEPANIVVEMARENQTTGRGLKSSRPRLKALEESLKDFGSQLLKEYPTDNSSLQKDRLYLYYLQNGRDMYTGAPLDIHRLSDYDIDHIIPRSFTTDNSIDNKVLVSSKENRLKKDDVPSEKVVKKMRSFWYDLYSSKLISKRKLDNLTKIKLTEEDKAGFIKRQLVETRQITKHVAGILHHRFNKAEDTNEPIRKVRIITLKSALVSQFRNRFGIYKVREINEYHHAHDAYLNGVVALALLKKYPQLAPEFVYGEYLKFNAHKANKATVKKEFYSNIMKFFESDTPVCDENGEIFWDKSKSIAQVKKVINHHHMNIVKKTEIQKGGFSKETVEPKKDSSKLLPRKNNWDPAKYGGLGSPNVAYTVAFTYEKGKARKRTNALEGITIMEREAFEQSPVLFLKNKGYEQAEIEMKLPKYALFELENGRKRMVASKEAQKANSFLLPEHLVTLLYHAKQYDEISHKESFDYVNEHHKEFSEVFARVLEFAGKYTLAEKNIEKLEKIYKENQTDDLAKLASSFVNLMQFNAMGAPADFKFFDVTIPRKRYTSLTEIWQSTIIHQSITGLYETRIRMGK

SEQ ID NO: 215 - protein, 1328 aa, Enterococcus faecium
MKKEYTIGLDIGTNSVGWSVLTDDYRLVSKKMKVAGNTEKSSTKKNFWGVRLFDEGQTAEARRSKRTARRRLARRRQRILELQKIFAPEILKIDEHFFARLNESFLVLDEKKQSRHPVFATIKQEKSYHQTYPTIYHLRQALADSSEKADIRLVYLAMAHLLKYRGHFLIEGELNTENSSVTETFRQFLSTYNQQFSEADKLDEAVDCSFVFTEKMSKTKKAETLLKYFPHEKSNGYLSQFIKLMVGNQGNFKNVFGLEEAKLQFSKETYEEDLEELLEKIGDDYIDLFVQAKNVYDAVLLSEILSDSTKNTRAKLSAGMIRRYDAHKEDLVLLKRFVKENLPKKYRAFFGDNSVNGYAGYIEGHATQEDFYKFVKKELTGIRGSEVFLTKIEQENFLRKQRTFDNGVIPHQIHLTELRAIIANQKKHYPFLKEEQEKLESLLTFKIPYYVGPLAKKQENSPFAWLIRKSEEKIKPWNLPEIVDMEGSAVRFIERMINTDMYIPHNKVLPKNSLLYQKFSIYNELTKVRYQDERGQMNYFSSIEKKEIFHELFEKNRKVTKKDLQEFLYLKYDIKHAELSGIEKAFNASYTTYHDFLTMSENKQWLEDPELASMFEEIIKTLTVFEDREMIKTRLSHHEATLGKHIIKKLTKKHYTGWGRLSKELIQGIRDKQSNKTILDYLIDDDFPHHRNRNFMQLINDDSLSFKKEIKKAQMITDTENLEEIVKELTGSPAIKKGILQSLKIVDEIVGIMGYEPANIVVEMARENQTTGRGLKSSRPRLKALEESLKDFGSQLLKEYPTDNSSLQKDRLYLYYLQNGRDMYTGAPLDIHRLSDYDIDHIIPRSFTTDNSIDNKVLVSSKENRLKKDDVPSEKVVKKMRSFWYDLYSSKLISKRKLDNLTKIKLTEEDKAGFIKRQLVETRQITKHVAGILHHRFNKAEDTNEPIRKVRIITLKSALVSQFRNRFGIYKVREINEYHHAHDAYLNGVVALALLKKYPQLAPEFVYGEYLKFNAHKANKATVKKEFYSNIMKFFESDTPVCDENGEIFWDKSKSIAQVKKVINHHHMNIVKKTEIQKGGFSEETVEPKKDSSKLLPRKNNWDPAKYGGLGSPNVAYTVAFTYEKGKARKRTNALEGITIMEREAFEQSPVLFLKNKGYEQAEIEMKLPKYALFELENGRKRMVASKEAQKANSFLLPEHLVTLLYHAKQYDEISHKESFDYVNEHHKEFSEVFARVLEFAGKYTLAEKNIEKLEKIYKENQTDDLAKLASSFVNLMQFNAMGAPADFKFFDVTIPRKRYTSLTEIWQSTIIHQSITGLYETRIRMGK

SEQ ID NO: 216 - protein, 1329 aa, Enterococcus faecium
MKKEYTIGLDIGTNSVGWSVLTDDYRLVSKKMKVAGNTEKSSTKKNFWGVRLFDEGQTAEARRSKRTARRRLARRRQRILELQKIFAPEILKIDEHFFARLNESFLVLDEKKQSRHPVFATIKQEKSYHQTYPTIYHLRQALADSSEKADIRLVYLAMAHLLKYRGHFLIEGELNTENSSVTETFRQFLSTYNQQFSEADKLDEAVDCSFVFTEKMSKTKKAETLLKYFPHEKSNGYLSQFIKLMVGNQGNFKNVFGLEEEAKLQFSKETYEEDLEELLEKIGDDYIDLFVQAKNVYDAVLLSEILSDSTKNTRAKLSAGMIRRYDAHKEDLVLLKRFVKENLPKKYRAFFGDNSVNGYAGYIEGHATQEDFYKFVKKELTGIRGSEVFLTKIEQENFLRKQRTFDNGVIPHQIHLTELRAIIANQKKHYPFLKEEQEKLESLLTFKIPYYVGPLAKKQENSPFAWLIRKSEEKIKPWNLPEIVDMEGSAVRFIERMINTDMYMPHNKVLPKNSLLYQKFSIYNELTKVRYQDERGQMNYFSSIEKKEIFHELFEKNRKVTKKDLQEFLYLKYDIKHAELSGIEKAFNASYTTYHDFLTMSENKQWLEDPELASMFEEIIKTLTVFEDREMIKTRLSHHEATLGKHIIKKLTKKHYTGWGRLSKELIQGIRDKQSNKTILDYLIDDDFPHHRNRNFMQLINDDSLSFKKEIKKAQMITDTENLEEIVKELTGSPAIKKGILQSLKIVDEIVGIMGYEPANIVVEMARENQTTGRGLKSSRPRLKALEESLKDFGSQLLKEYPTDNSSLQKDRLYLYYLQNGRDMYTGAPLDIHRLSDYDIDHIIPRSFTTDNSIDNKVLVSSKENRLKKDDVPSEKVVKKMRSFWYDLYSSKLISKRKLDNLTKIKLTEEDKAGFIKRQLVETRQITKHVAGILHHRFNKAEDTNEPIRKVRIITLKSALVSQFRNRFGIYKVREINEYHHAHDAYLNGVVALALLKKYPQLAPEFVYGEYLKFNAHKANKATVKKEFYSNIMKFFESDTPVCDENGEIFWDKSKSIAQVKKVINHHHMNIVKKTEIQKGGFSKETVEPKKDSSKLLPRKNNWDPAKYGGLGSPNVAYTVAFTYEKGKARKRTNALEGITIMEREAFEQSPVLFLKNKGYEQAEIEMKLPKYALFELENGRKRMVASKEAQKANSFLLPEHLVTLLYHAKQYDEISHKESFDYVNEHHKEFSEVFARVLEFAGKYTLAEKNIEKLEKIYKENQTDDLAKLASSFVNLMQFNAMGAPADFKFFDVTIPRKRYTSLTEIWQSTIIHQSITGLYETRIRMGK

SEQ ID NO: 217 - protein, 1329 aa, Enterococcus faecium
MKKEYTIGLDIGTNSVGWSVLTDDYRLVSKKMKVAGNTEKSSTKKNFWGVRLFDEGQTAEARRSKRTARRRLARRRQRILELQKIFAPEILKIDEHFFARLNESFLVLDEKKQSRHPVFATIKQEKSYHQTYPTIYHLRQALADSSEKADIRLVYLAMAHLLKYRGHFLIEGELNTENSSVTETFRQFLSTYNQQFSEADKLDEAVDCSFVFTEKMSKTKKAETLLKYFPHEKSNGYLSQFIKLMVGNQGNFKNVFGLEEEAKLQFSKETYEEDLEELLEKIGDDYIDLFVQAKNVYDAVLLSEILSDSTKNTRAKLSAGMIRRYDAHKEDLVLLKRFVKENLPKKYRAFFGDNSVNGYAGYIEGHATQEDFYKFVKKELTGIRGSEVFLTKIEQENFLRKQRTFDNGVIPHQIHLTELRAIIANQKKHYPFLKEEQEKLESLLTFKIPYYVGPLAKKQENSPFAWLIRKSEEKIKPWNLPEIVDMEGSAVRFIERMINTDMYIPHNKVLPKNSLLYQKFSIYNELTKVRYQDERGQMNYFSSIEKKEIFHELFEKNRKVTKKDLQEFLYLKYDIKHAELSGIEKAFNASYTTYHDFLTMSENKQWLEDPELASMFEEIIKTLTVFEDREMIKTRLSHHEATLGKHIIKKLTKKHYTGWGRLSKELIQGIRDKQSNKTILDYLIDDDFPHHRNRNCMQLINDDSLSFKKEIKKAQMITDTENLEEIVKELTGSPAIKKGILQSLKIVDEIVGIMGYEPANIVVEMARENQTTGRGLKSSRPRLKALEESLKDFGSQLLKEYPTDNSSLQKDRLYLYYLQNGRDMYTGAPLDIHRLSDYDIDHIIPRSFTTDNSIDNKVLVSSKENRLKKDDVPSEKVVKKMRSFWYDLYSSKLISKRKLDNLTKIKLTEEDKAGFIKRQLVETRQITKHVAGILHHRFNKAEDTNEPIRKVRIITLKSALVSQFRNRFGIYKVREINEYHHAHDAYLNGVVALALLKKYPQLAPEFVYGEYLKFNAHKANKATVKKEFYSNIMKFFESDTPVCDENGEIFWDKSKSIAQVKKVINHHHMNIVKKTEIQKGGFSKETVEPKKDSSKLLPRKNNWDPTKYGGLGSPNVAYTVAFTYEKGKARKRTNALEGITIMEREAFEQSPVLFLKNKGYEQAEIEMKLPKYALFELENGRKRMVASKEAQKANSFLLPEHLVTLLYHAKQYDEISHKESFDYVNEHHKEFSEVFARVLEFAGKYTLAEKNIEKLEKIYKENQTDDLAKLASSFVNLMQFNAMGAPADFKFFDVTIPRKRYTSLTEIWQSTIIHQSITGLYETRIRMGK

SEQ ID NO: 218 - protein, 1329 aa, Enterococcus faecium
MTKDYTIGLDIGTNSVGWAVLTDDYQLMKRKMSVHGNTEKKKIKKNFWGARLFDEGQTAEFRRTKRTNRRRLARRKYRLSKLQDLFAEELCKQDDCFFVRLEESFLVPEEKQYKPASIFPTLEEEKEYYQKYPTIYHLRQKLVDSTEKEDLRLVYLALAHLLKYRGHFLFEGDLDTENTSIEESFRVFLEQYSKQSDQPLIVHQPVLTILTDKLSKTKKVEEILKYYPTEKINSFFAQCLKLIVGNQANFKRIFDLEAEVKLQFSKETYEEDLESLLEKIGDEYLDIFLQAKKVHDAILLSEIISSTVKHTKAKLSSGMVERYERHKADLAKFKQFVKENVPQKATVFFKDTTKNGYAGYIKGKTTQEEFYKFVKKELSGVVGSEPFLEKIDQETFLLKQRTYTNGVIPHQVHLIELKAIIDQQKQHYPFLEEAGPKIIALFKFRIPYYVGPLAKEQEASSFAWIERKTAEKINPWNFSEVVDIEKSAMRFIQRMTKQDTYLPTEKVLPKNSLLYQKYMIFNELTKVSYKDERGVKQYFSGDEKQQIFKQLFQKERGKITVKKLQNFLYTHYHIENAQIFGIEKAFNASYSTYHDFMKLAKTNEWLEQPEMEPIFEDIVKILTIFEDRQMIKHQLSKYQEVFGEKLLKEFARKHYTGWGRFSAKLIHGIRDRKTNKTILDYLIDDDVPANRNRNLMQLINDEHLSFKEEIAKATVFSKHKSLVDVIQDLPGSPAIKKGIWQSLKIVEELIAIIGYKPKNIVIEMARENQKTHRTSPRLKALENGLKQIGSTLLKEQPTDNKALQKERLYLYYLQNGRDMYTGEPLEIENLHQYEVDHIIPRSFIVDNSIDDKVLVASKQNQKKRDDVPKKQIVNEQRIFWNQLKEAKLISTKKYAYLTKIELTPEDKARFIQRQLVETRQITKHVANILHQSFNQEEEGTDCDGVQIITLKATLTSQFRQTFGLYKVREINPHHHAHDAYLNGFIANVLLKRYPKLAPEFVYGKYVKYSLARENKATAKKEFYSNILKFLESDEPFCDENGEIYWEKSHHLPRIKKVLSSHQVNVVKKVEQQKGGFYKETVNSKEKPDKLIERKNNWDVTKYGGFGSPVIAYAIAFVYAKGKTQKKTRAIEGITIMEQAAFEKDPTTFLKEKGFPQVTEFIKLPKYTLFEFDNGRRRFLASKESQKGNPFILSDQLVTLLYHAQHYDKITYQESFDYVNTHLSDFSAILTEVLAFAEKYTLADKNIERIQELYEENKYGETSMIAQSFLQLLQFNAIGAPADFKFFGVTIPRKRYTSLTEIWDATIIYQSVTGLYETRIRMGDLWAGEQ

SEQ ID NO: 219 - protein, 1329 aa, Enterococcus faecium
MKKEYTIGLDIGTNSVGWSVLTDDYRLVSKKMKVAGNTEKSSTKKNFWGVRLFDEGQTAEARRSKRTARRRLARRRQRILELQKIFAPEILKIDEHFFARLNESFLVLDEKKQSRHPVFATIKQEKSYHQTYPTIYHLRQALADSSEKADIRLVYLAMAHLLKYRGHFLIEGELNTENSSVTETFRQFLSTYNQQFSEADKLDEAVDCSFVFTEKMSKTKKAETLLKYFPHEKSNGYLSQFIKLMVGNQGNFKNVFGLEEEAKLQFSKETYEEDLEELLEKIGDDYIDLFVQAKNVYDAVLLSEILSDSTKNTRAKLSAGMIRRYDAHKEDLVLLKRFVKENLPKKYRAFFGDNSVNGYAGYIEGHATQEDFYKFVKKELTGIRGSEVFLTKIEQENFLRKQRTFDNGVIPHQIHLTELRAIIANQKKHYPFLKEEQEKLESLLTFKIPYYVGPLAKKQENSPFAWLIRKSEEKIKPWNLPEIVDMEGSAVRFIERMINTDMYMPHNKVLPKNSLLYQKFSIYNELTKVRYQDERGQMNYFSSIEKKEIFHELFEKNRKVTKKDLQEFLYLKYDIKHAELSGIEKAFNASYTTYHDFLTMSENKQWLEDPELASMFEEIIKTLTVFEDREMIKTRLSHHEATLGKHIIKKLTKKHYTGWGRLSKELIQGIRDKQSNKTILDYLIDDDFPHHRNRNFMQLINDDSLSFKKEIKKAQMITDTENLEEIVKELTGSPAIKKGILQSLKIVDEIVGIMGYEPANIVVEMARENQTTGRGLKSSRPRLKALEESLKDFGSQLLKEYPTDNSSLQKDRLYLYYLQNGRDMYTGAPLDIHRLSDYDIDHIIPRSFTTDNSIDNKVLVSSKENRLKKDDVPSEKVVKKMRSFWYDLYSSKLISKRKLDNLTKIKLTEEDKAGFIKRQLVETRQITKHVAGILHHRFNKAEDTNEPIRKVRIITLKSALVSQFRNRFGIYKVREINEYHHAHDAYLNGVIALALLKKYPQLAPEFVYGEYLKFNAHKANKATVKKEFYSNIMKFFESDTPVCDENGEIFWDKSKSIAQVKKVINHHHMNIVKKTEIQKGGFSKETVEPKKDSSKLLPRKNNWDPAKYGGLGSPNVAYTVAFTYEKGKARKRTNALEGITIMEREAFEQSPVLFLKNKGYEQAEIEMKLPKYALFELENGRKRMVASKEAQKANSFLLPEHLVTLLYHAKQYDEISHKESFDYVNEHHKEFSEVFARVLEFAGKYTLAEKNIEKLEKIYKENQTDDLAKLASSFVNLMQFNAMGAPADFKFFDVTIPRKRYTSLTEIWQSTIIHQSITGLYETRIRMGK

SEQ ID NO: 220 - protein, 1329 aa, Enterococcus faecium
MTKDYTIGLDIGTNSVGWAVLTDDYQLMKRKMSVHGNTEKKKIKKNFWGARLFDEGQTAEFRRTKRTNRRRLARRKYRLSKLQDLFAEELCKQDDCFFVRLEESFLVPEEKQYKPASIFPTLEEEKEYYQKYPTIYHLRQKLVDSTEKGDLRLVYLALAHLLKYRGHFLFEGDLDTENTSIEESFRVFLEQYGKQSDQPLIVHQPVLTILTDKLSKTKKVEEILKYYPTEKINSFFAQCLKLIVGNQANFKRIFDLEAEVKLQFSKETYEEDLESLLEKIGDEYLDIFLQAKKVHDAILLSEIISSTVKHTQAKLSSGMVERYERHKADLAKFKQFVKENVPQKATVFFKDTTKNGYAGYIKGKTTQEEFYKFVKKELSGVVGSEPFLEKIDQETFLLKQRTYTNGVIPHQVHLIELKAIIDQQKQHYPFLEEAGPKIIALFKFRIPYYVGPLAKEQEASSFAWIERKTAEKINPWNFSEVVDIEKSAMRFIQRMTKQDTYLPTEKVLPKNSLFYQKYMIFNELTKVSYKDERGVKQYFSGDEKQQIFKQLFQKERGKITVKKLQNFLYTHYHIENAQIFGIEKAFNASYSTYHDFMKLAKTNEWLEQPEMEPIFEDIVKILTIFEDRQMIKHQLSKYQEVFGEKLLKEFARKHYTGWGRFSAKLIHGIRDRKTNKTILDYLIDDDVPANRNRNLMQLINDEHLSFKEEIAKATVFSKHKSLVDVIQDLPGSPAIKKGIWQSLKIVEELIAIIGYKPKNIVIEMARENQKTHRTKPRLKALENGLKQIGSTLLKEQPTDNKALQKERLYLYYLQNGRDMYTGEPLEIENLHQYEVDHIIPRSFIVDNSIDNKVLVASKQNQKKRDDVPKKQIVNEQRIFWNQLKEAKLISPKKYAYLTKIELTPEDKARFIQRQLVETRQITKHVANILHQSFNQEEEGTDCDGVQIITLKATLTSQFRQTFGLYKVREINPHHHAHDAYLNGFIANVLLKRYPKLAPEFVYGKYVKYSLARENKATAKKEFYSNILKFLESDEPFCDENGEIYWEKSHHLPRIKKVLSSHQVNVVKKVEQQKGGFYKETVNSKEKPDKLIERKNNWDVTKYGGFGSPVIAYAIAFVYAKGKTQKKTKAIEGITIMEQAAFEKDPTTFLKDKGFPQVTEFIKLPKYTLFEFDNGRRRFLASKESQKGNPFILSDQLVTLLYHAQHYDKITYQESFDYVNTHLSDFSAILTEVLAFAEKYTLADKNIERIQELYEENKYGEISMIAQSFLQLLQFNAIGAPADFKFFGVTIPRKRYTSLTEIWDATIIYQSVTGLYETRIRMGDLWAGEQ

SEQ ID NO: 221 - protein, 1329 aa, Enterococcus faecium
MTKDYTIGLDIGTNSVGWAVLTDDYQLMKRKMSVHGNTEKKKIKKNFWGARLFDEGQTAEFRRTKRTNRRRLARRKYRLSKLQDLFAEELCKQDDCFFVRLEESFLVPEEKQYKPASIFPTLEEEKEYYQKYPTIYHLRQKLVDSTEKEDLRLVYLALAHLLKYRGHFLFEGDLDTENTSIEESFRVFLEQYSKQSDQPLIVHQPVLTILTDKLSKTKKVEEILKYYPTEKINSFFAQCLKLIVGNQANFKRIFDLEAEVKLQFSKETYEEDLESLLEKIGDEYLDIFLQAKKVHDAILLSEIISSTVKHTKAKLSSGMVERYERHKADLAKFKQFVKENVPQKATVFFKDTTKNGYAGYIKGKTTQEEFYKFVKKELSGVVGSEPFLEKIDQETFLLKQRTYTNGVIPHQVHLIELKAIIDQQKQHYPFLEEAGPKIIALFKFRIPYYVGPLAKEQEASSFAWIERKTAEKINPWNFSEVVDIEKSAMRFIQRMTKQDTYLPTEKVLPKNSLLYQKYMIFNELTKVSYKDERGVKQYFSGDEKQQIFKQLFQKERGKITVKKLQNFLYTHYHIENAQIFGIEKAFNASYSTYHDFMKLAKTNEWLEQPEMEPIFEDIVKILTIFEDRQMIKHQLSKYQEVFGEKLLKEFARKHYTGWGRFSAKLIHGIRDRKTNKTILDYLIDDDVPANRNRNLMQLINDEHLSFKEEIAKATVFSKHKSLVDVIQDLPGSPAIKKGIWQSLKIVEELIAIIGYKPKNIVIEMARENQKTHRTSPRLKALENGLKQIGSTLLKEQPTDNKALQKERLYLYYLQNGRDMYTGEPLEIENLHQYEVDHIIPRSFIVDNSIDNKVLVASKQNQKKRDDVPKKQIVNEQRIFWNQLKEAKLISPKKYAYLTKIELTPEDKARFIQRQLVETRQITKHVANILHQSFNQEEEGTDCDGVQIITLKATLTSQFRQTFGLYKVREINPHHHAHDAYLNGFIANVLLKRYPKLAPEFVYGKYVKYSLARENKATAKKEFYSNILKFLESDEPFCDENGEIYWEKSHHLPRIKKVLSSHQVNVVKKVEQQKGGFYKETVNSKEKPDKLIERKNNWDVTKYGGFGSPVIAYAIAFVYAKGKTQKKTRAIEGITIMEQAAFEKDPTTFLKEKGFPQVTEFIKLPKYTLFEFDNGRRRFLASKESQKGNPFILSDQLVTLLYHAQHYDKITYQESFDYVNTHLSDFSAILTEVLAFAEKYTLADKNIERIQELYEENKYGETSMIAQSFLQLLQFNAIGAPADFKFFGVTIPRKRYTSLTEIWDATIIYQSVTGLYETRIRMGDLWAGEQ

SEQ ID NO: 222 - protein, 1329 aa, Enterococcus faecium
MTKDYTIGLDIGTNSVGWAVLTDDYQLMKRKMSVHGNTEKKKIKKNFWGARLFDEGQTAEFRRTKRTNRRRLARRKYRLSKLQDLFAEELCKQDDCFFVRLEESFLVPEEKQYKPASIFPTLEEEKEYYQKYPTIYHLRQKLVDSTEKEDLRLVYLALAHLLKYRGHFLFEGDLDTENTSIEESFRVFLEQYGKQSDQPLIVHQPVLTILTDKLSKTKKVEEILKYYPTEKINSFFAQCLKLIVGNQANFKRIFDLEAEVKLQFSKETYEEDLESLLEKIGDEYLDIFLQAKKVHDAILLSEIISSTVKHTQAKLSSGMVERYERHKADLAKFKQFVKENVPQKATVFFKDTTKNGYAGYIKGKTTQEEFYKFVKKELSGVVGSEPFLEKIDQETFLLKQRTYTNGVIPHQVHLIELKAIIDQQKQHYPFLEEAGPKIIALFKFRIPYYVGPLAKEQEASSFAWIERKTAEKINPWNFSEVVDIEKSAMRFIQRMTKQDTYLPTEKVLPKNSLLYQKYMIFNELTKVSYKDERGVKQYFSGDEKQQIFKQLFQKERGKITVKKLQNFLYTHYHIENAQIFGIEKAFNASYSTYHDFMKLAKTNEWLEQPEMEPIFEDIVKILTIFEDRQMIKHQLSKYQEVFGEKLLKEFARKHYTGWGRFSAKLIHGIRDRKTNKTILDYLIDDDVPANRNRNLMQLINDEHLSFKEEIAKATVFSKHKSLVDVIQDLPGSPAIKKGIWQSLKIVEELIAIIGYKPKNIVIEMARENQKTHRTKPRLKALENGLKQIGSTLLKEQPTDNKALQKERLYLYYLQNGRDMYTGEPLEIENLHQYEVDHIIPRSFIVDNSIDNKVLVASKQNQKKRDDVPNKQIVNEQRIFWNQLKEAKLISPKKYAYLTKIELTPEDKARFIQRQLVETRQITKHVANILHQSFNQEEEGTDCDGVQIITLKATLTSQFRQTFGLYKVREINPHHHAHDAYLNGFIANVLLKRYPKLAPEFVYGKYVKYSLARENKATAKKEFYSNILKFLESDEPFCDENGEIYWEKSHHLPRIKKVLSSHQVNVVKKVEQQKGGFYKETVNSKEKPDKLIERKNNWDVTKYGGFGSPVIAYAIAFVYAKGKTQKKTRAIEGITIMEQAAFEKDPTTFLKDKGFPHVTEFIKLPKYTLFEFDNGRRRFLASKESQKGNPFILSDQLVTLLYHAQHYDKITYQESFDYVNTHLSDFSAILTEVLAFAEKYTLADKNIERIQELYEENKYGEISMIAQSFLQLLQFNAIGAPADFKFFGVTIPRKRYTSLTEIWDATIIYQSVTGLYETRIRMGDLWAGEQ

SEQ ID NO: 223 - protein, 1324 aa, Enterococcus italicus
MKNDYTIGLDIGTNSVGYSVVTDDYKVISKKMNVFGNTEKKSIKKNFWGVRLFESGQTAQEARMKRTSRRRIARRKNRICYLQEIFQPEMNHLDNNFFYRLNESFLVADDAKYDKHPIFGTLDEEIHFHEQFPTIYHLRKYLADGDEKADLRLVYLAIAHIIKFRGNFLIEGELNTENNSVIELSKVFVQLYNQTLSELEFIDESIDFSEVLTQQLSKSERADNVLKLFPDEKGTGIFAQFIKLIVGNQGNFKKVFQLEEDQKLQLSTDDYEENIENLLAIIGDEYGDIFVAAQNLYQAILLAGILTSTEKTRAKLSASMIQRYEEHAKDLKLLKRFVKEHIPDKYAEIFNDATKNGYAGYIDGKTKEEEFYKYLKTTLVQKSGYQYFIEKIEQENFLRKQRIYDNGVIPHQVHAEELRAILRKQEKYYSFLKENHEKIEQIFKVRIPYYVGPLAKHNEQSRFAWNIRKSDEPIRPWNMNDVVDENASAVAFIERMTIKDIYLNENVLPRHSLIYEKFTVFNELTKVLYADDRGVFQRFSAEEKEDIFEKLFKSERKVTKKKLENYLRIELSISSPSVKGIEEQFNANFGTYLDLKKFDELHPYLDDEKYQDTLEEVIKVLTVFEDRSMIQNQLEQLPLNLSTKTIKALSRRKYTGWGRLSARLIDGIHDKNSGKTILDYLIDESDSYIVNRNFMQLINDDHLSFKKIIEDSQPYKEQQSAEEIVSELSGSPAIKKGILQSLKIVDELVAIMGYKPKNIVVEMARENQTTGRGKQNSKPRLKGIENGLKEFSDSVLKGSSIDNKQLQNDRLYLYYLQNGKDMYTGHELDIDHLSTYDIDHIIPQSFLTDNSIDNRVLTTSKSNRGKSDNVPSEEVVRKMDRFWRKLLNAKLISERKYTNLTKKELTESDKAGFLKRQLVETRQITKHVATILDSKFNEDSNNRDVQIITLKSALVSEFRKTFNLYKVREINDLHHAHDAYLNAVVALSLLRVYPQLKPEFVYGEYGKNSIHDQNKATIKKQFYSNITRYFASKDIINDDGEILWNKQETIAQVIKTLGMHQVNVVKKVEIQKGGFSKESIQPKGESQKLIRRKQQWNTKKYGGFDSPVVAYAILLSFDKGKRKARSFKIVGITIQDRESFEGNPILYLSKKDYHNPKVEAILPKYSLFEFENGRRRMVASSETQKGNQLIIPGHLMELLYHSKKIINGKNSDSVSYIQNNKEKFREIFEYIVDFSSKYISADANLNKIEKIFENNFHKASEQEIAKSFINLLTFTAMGAPADFEFFGEKIPRKRYVSISEIIDAVFIHQSITGLYETRVRLTEV

SEQ ID NO: 224 - protein, 1323 aa, Enterococcus mundtii
MEKEYTIGLDIGTNSVGWAVLTDDYRLVARKMSIQGDSNRKKIKKNFWGARLFEEGKTAQFRRIKRTNRRRIARRRQRVLALQDIFAEEIHKKDPNFFARLEEGDRVEADKRFAKFPVFATLSEEKNYHRQYPTIYHLRHDLANSKEQADIRLVYLAIAHCLKYRGHFLFEGELDTENTSVTENYQQFLQAYQQFFPEPIGDLDDAVPILTERLSKAKRVEKVLAYYPSEKSTGNFAQFLKLMVGNQANFKKTFDLEEEMKLNFTRDCYEEDLNELLEKTSDDYAELFLKAKGVYDAILLSQILSKSDDETKAKLSANMKLRFEEHQRDLKQLKELVRRDLPKKYDDFFKNRSKNGYAGYVKGKATQEDFYKFLRTELAGLEESQSIMEKIDLEIYLLKQRTFANGVIPHQIHLVEMREIMDRQKRFYPFLKGAQGKIEKLLTFRIPYYVGPLAQEGQSPFAWIKRKSPSQITPWNFAEVVDKENSAIEFIERMTNQDTYLPKEKVLPKQSLIYQRFMIFNELTKVSYTDERGKSHYFSSEQKRKIFNELFKQHPRVTEKQLRKFLELNEQIDSTEIKGIETSFNASYSTYHDLLKLSTLLDDPDMTTMFEEIIKILTIFEDREMIREQLKPYETVLGLPAIKKLAKKHYTGWGRLSEKMIQGMREKQSRKTILDYLIDDDFPCNRNRNFMQLINDDHLSFKETIANELIMSDSNVLLDQVKAIPGSPAVKKGIWQSIKIVEEIIGIIGKAPKNIVIEMARENQRTSRSRPRLKALEEALKNIDSPLLKDYPTDNQALQKDRLYLYYLQNGKDMYTGEPLEIHRLSEYDIDHIIPRSFIVDNSLDNKVLVSSKVNRGKLDNAPDPLVVKRMRSHWEKLHQAKLISDKKLANLTKQNLTEADKARFIQRQLVETRQITKHVANLLHQHFNLPEEVSATEKTSIITLKSTLTSQFRQMFDIYKVREINHHHHAHDAYLNGVVAMTLLKKYPKLAPEFVYGSYIKGDINQINKATAKKEFYSNIMKFFESEEIICDEQGEVIWNKKRDLSTIKKTIGAHQVNIVKKVEKQKGGFYKETINSKANPEKLIPRKASLDPLKYGGYGSPLVAYTVIFIFEKGKQKKVTKGIEGITVMEQLRFEQDPREFLKTKGYEGVKQWLILPKYILFEAQGGYRRMIASQETQKANSLILPENLVTLLYHARHYDEINHKVSFDYVNAHKEGFNDIFDFISDFGVRYILAPQHLEKIKVAYEKNKEVDLKEMIDAILSLLKFTLFGASVEFKFFDIKILKRYKSLTDIWEATIIYQSVTGLYERRVEVRKLWDGER

SEQ ID NO: 225 - protein, 1330 aa, Enterococcus phoeniculicola
MKKEYTIGLDIGTNSVGWAVLTENYDLVKKKMKVYGNTETKYLKKNLWGVRLFDEGETAADRRLKRTTRRRYSRRRNRICRLQDLFTEEMNQVDANFFHRLQESFLVPDEKEFERHAIFGKMEEEVSYYREFPTIYHLRKHLADTSEQADLRLVYLALAHIVKYRGHFLIEGELNTENSSVSETFRTFIQVYNQIFRENEPLAVPDNIEELFSEKVSRARKVEAILSVYSEEKSTGTLAQFLKLMVGNQGRFKKTFDLEEDGIIQIPKEEYEEELETLLAIIGDEYAEIFSATKSVYDAVALSGILSVTDGDTKAKLSASMVERYEAHQKDLVQFKQFIRKELPEMYAPIFRDNSVSGYAGYVENSVTQAEFYKYIKKAIEKVPGAEYFLEKIEQETFLDKQRTFNNGVIPHQIHLEELEAIIQKQATYYPFLADNKEEMKQLVTFRIPYYVGPLADGNSPFAWLERISSEPIRPGNLAEVVDIKKSATKFIERMTNFDTYLPTEKVLPKHSMIYEKYMVYNELTKVSYVDERGMNQRFSGEEKKQIVEELFKQSRKVTKKLLEKFLSNEFGLVDVAIKGIETSFNAGYGTYHDFLKIGITREQLDKEENSETLEEIVKILTVFEDRKMIREQLKKYTYLFDEEVLKKLERRHYTGWGRLSAKLLIGIKEKRTHKTILDYLIDDGGKQPINRNLMQLINDSDLSFKSEIAEAQSDMNTEDLHEVVQNLAGSPAIKKGILQSLKIVDELVDIMGSLPKNIVVEMARENQTTSRGRTNSNPRMKALEEAMRNLRSNLLKEYPTDNQALQNDRLYLYYLQNGKDMYTGLDLSLHNLSSYDIDHIVPQSFTTDNSLDNRVLVSSKENRGKKDDVPSKEVVQKNITLWETLKNSNLISQKKYDNLTKGLRGGLTEDDRAHFIKRQLVETRQITKHVARILDQRFNSQKDEEGKTIRAVRVVTLKSSLTSQFRKQFAIHKVREINDYHHGHDAYLNGVVANSLLRVYPQLQPEFVYGDYPKFNAYKANKATAKKQLYTNIMKFFAEDAVIIDENGEILWDKKNIATVKKVMSYPQMNIVKKPEIQTGSFSKETIKPKGDSDKLISRKTNWSPKLYGGFDSPQVAYSVIITYEKGKKKVRAKAIVGITIMEQSLFKKDPVSLLEEKGYANPEVLIHLPKYTLYELENGRRRLLASANEAQKGNQLVLPASLVTLLYHAKQVDEDSGKSEEYVREHRAEFAEILNYVQAFSETKILANKNLQTILKLYEENKEADIKEIAESFVNLMKFSAYGAPMDFKFFGKTIPRSRYTSVGELLSATIINQSITGLYETRRKLVD

SEQ ID NO: 226 - protein, 1327 aa, unidentified
  source 1..1327: note = Enterococcus sp. AM1
MGKEYTIGLDIGTNSVGWAVLQEDLDLVRRKMKVYGNTEKNYLKKNFWGVDLFDEGMTAKDTRLKRTTRRRYFRRRQRISYLQTFFQEEMNRIDPNFFNRLDESFLIEEDKLSERHPIFGTIEEEVAYHKNYATIYHLRKELADAEEKADLRLVYLALAHIIKYRGHFLIEGRLSTENTSTEETFKTFLQKYNQTFNPVDETISIGSIFADKVSRAKKAEGVLALFPDEKRNGTFDQFLKMIVGNQGNFKKTFELEEDAKLQFSKEEYDESLEALLGEIGDEYADVFEAAKNVYNAVELSGILTVTDNSTKAKLSASMIKRYEDHKTDLKLFKEFIRKNLPEKYHEIFNDKNTDGYAGYIDNSTSQEKFYKYITNLIEKIDGAEYFLKKIENEDFLRKQRTFDNGIIPHQIHLEELKAILHHQAMYYPFLQEKFSNFVDLLTFRIPYYVGPLANGNSRFSWLSRKSDEPIRPWNLAEVVDLSKSAELFIERMTNFDLYLPSEKVLPKHSMLYEKYTVYNELTKVTYKDEQGKVQNFSSEEKERIFIDLFKQHRKVTKKDLSNFLRNEYNLDDVIIDGIENKFNASFNTYHDFLKLKIDPKVLDDPANEPMFEEIVKILTIFEDRKMLREQLSKFSDRLSEKTIKDLERRHYTGWGRLSAKLINGIHDKQSNKTILDYLIDDAPKKNINRNFMQLINDNRLTFKEEIEKEQLKANSEESLIEIVQNLAGSPAIKKGIFQSLKIVDELVEIMGYAPTNIVVEMARENQTTANGRRNSRPRLKNLEKAIDDLDSEILKKHPVDNKALQKDRLYLYYLQNGKDMYTNEELDIHKLSTYDIDHIIPQSFIVDNSLDNRVLVSSSKNRGKLDDVPSKEVVKKMRAFWESLYRSGLISKKKFDNLVKAESGGLSEDDKAGFIHRQLVETRQITKNVARILHQRFNSEKDEEGNLIRKVRIITLKSALTSQFRKNYGIYKIREINDYHHAHDAYLNGVVATALLKIYPQLEPEFVYGEFHRFNAFKENKATAKKQFYSNLMEFSKSDKVIIDENGEILWNQKKIVTVKKVMNYRQMNIVKKVEIQKGGFSKESILPKGDSDKLISRKKEWDTTKYGGFDSPNVAYSVVIRYEKGKTRKLVKTIVGITIMERAAFEKNEREFLKNKGYQNPQICMKLPKYSLYEFDDGRRRLLASAKEAQKGNQMVLPAHLVTFLYHAKHCNEKPDSLKYVTEHQSGFSEIMAHVKDFAEKYTLVDKNLEKILSLYAKNMDSEVKEIAQSFVDLMQLNAFGAPADFKFFGETIPRKRYTSVNELLEATIINQSITGLYETRRRLGD

SEQ ID NO: 227 - protein, 1332 aa, Enterococcus villorum
MNKAYTLGLDIGTNSVGWAVVTDDYRLMAKKMPVHSKMEKKKIKKNFWGARLFDEGQTAEERRNKRATRRRLRRRKYRILELQKIFSEEILKKDSHFFARLDESFLIPEDKQYARFPIFPTLLEEKAYYQNYPTIYHLRQKLADSTEKADIRLVYLALAHMIKYRGHFLFEGELDTENTSVEETFKEFIDIYNEQFEEGIIFYKDIPLILTDKLSKSKKVEKILQYYPKEKTTGCLAQFLKLIVGNQGNFKQAFHLDEEVKIQISKETYEEDLEKLLRKSNEEMIDVFLQVKKVYDAILLSDILSTKMKDTKAKLSAGMIERYQNHKKDLEELKQFVRAHLHEKVTVFFKDSSKDGYAGYIDGKTTQADFYKFLKKELTGVPGSEPMLAKIDQENFLLKQRTPTNGVIPHQVHLTEFKAIIDQQKQYYPFLEKSKEKMIQLLTFRIPYYVGPLAQDKETSSFAWLERKTTEKIKPWNAKDVIDYGASATKFIQRMINYDTYLPTEKVLPKYSMLYQKYTIFNELTKVAYKDDRGIKHQFSSEEKLRIFQELFKKQRRVTKKKLQHFLSANYNIEDAEILGVDKVFNSSYATYHDFLELAKPYELLEQPEMEEMFEDIVKIITIFEDREMVRTQLKKYQRILGEEIFKKLVKKKYTGWGRLSKRLINGIRDQKTNKTILDYLIDDDFPYNRNRNFMQLINDDHLSFKEEIAKELTLSDKQSLLEVVEAIPGSPAIKKGIWQTLKIVEELIAIIGYKPKNIVIEMARENQTTTGGKNRSKPRLKSLEEALKNFDSQLLKERPVDNQSLQKDRLYLYYLQNGKDMYTGESLDIDRLSEYDIDHIIPRSFIVDHSLDNKVLVSSKENRLKKDDVPDSKVVKRMKAYWEKLLRANLISERKFSYLTKLELTDDDKARFIQRQLVETRQITKHVAAILHQYFNQTQELEKEKDIRIITLKSSLVSQFRQVFGIHKVREINHHHHAHDAYLNAVVALALLKKYPRLAPEFVYGSFAKFHLVKENKATAKKEFYSNILKFFEKEEQFCDENGEIFWDKRKHIQQIKKVISSHQVNIVKKVEVQTGSFYKETVNTKEKPDKLIKRKNNWDVTKYGGFGSPVVAYAVVFTYEKGKNHKKAKAIEGITIMEQALFEKDPISFLIEKGYSNVNQFIKLPKYTLFELANGQRRMLASQELQKANSFILPEKLVTLLYHANHYDEIAYKDSYDYVNEHFSNFQDILDKVIIFAEKYTSAPQKLNQIIATYEKNQEADRKIMAHSFVNLMQFNALGAPADFKFFDTTITRKRYTSLTEIWQSTIIYQSVTGLYETRRRMADLWDGVQ

SEQ ID NO: 228 - protein, 1359 aa, synthetic construct
  REGION 1..1359: note = Synthetic Polypeptide
ADKKYSIGLDIGTNSVGWAVITDEYKVPSKKFKVLGNTDRHSIKKNLIGALLFDSGETAEATRLKRTARRRYTRRKNRICYLQEIFSNEMAKVDDSFFHRLEESFLVEEDKKHERHPIFGNIVDEVAYHEKYPTIYHLRKKLVDSTDKADLRLIYLALAHMIKFRGHFLIEGDLNPDNSDVDKLFIQLVQTYNQLFEENINASGVDAKAILSARLSKSRRLENLIAQLPGEKKNGLFGNLIALSLGLTPNFKSNFDLAEDAKLQLSKDTYDDDLDNLLAQIGDQYADLFLAAKNLSDAILLSDILRVNTEITKAPLSASMIKRYDEHHQDLTLLKALVRQQLPEKYKEIFFDQSKNGYAGYIDGGASQEEFYKFIKPILEKMDGTEELLVKLNREDLLRKQRTFDNGSIPHQIHLGELHAILRRQEDFYPFLKDNREKIEKILTFRIPYYVGPLARGNSRFAWMTRKSEETITPWNFEEVVDKGASAQSFIERMTNFDKNLPNEKVLPKHSLLYEYFTVYNELTKVKYVTEGMRKPAFLSGEQKKAIVDLLFKTNRKVTVKQLKEDYFKKIECFDSVEISGVEDRFNASLGTYHDLLKIIKDKDFLDNEENEDILEDIVLTLTLFEDREMIEERLKTYAHLFDDKVMKQLKRRRYTGWGRLSRKLINGIRDKQSGKTILDFLKDGFANRNFMQLIHDDSLTFKEDIQKAQVSGQGDSLHEHIANLAGSPAIKKGILQTVKVVDELVKVMGRHKPENIVIEMARENQTTQKGQKNSRERMKRIEEGIKELGSQILKEHPVENTQLQNEKLYLYYLQNGRDMYVDQELDINRLSDYDVDHIVPQSFLKDDSIDNKVLTRSDKNRGKSDNVPSEEVVKKMKNYWRQLLNAKLITQRKFDNLTKAERGGLSELDKAGFIKRQLVETRQITKHVAQILDSRMNTKYDENDKLIREVKVITLKSKLVSDFRKDFQFYKVREINNYHHAHDAYLNAVVGTALIKKYPKLESEFVYGDYKVYDVSEQEIGKATAKYFFYSNIMNFFKTEITLANGEIRKRPLIETNGETGEIVWDKGRDFATVRKVLSMPQVNIVKKTEVQTGGFSKESILPKRNSDKLIARKKDWDPKKYGGFDSPTVAYSVLVVAKVEKGKSKKLKSVKELLGITIMERSSFEKNPIDFLEAKGYKEVKKDLIIKLPKYSLFELENGRKRMLASGELQKGNELALPSKYVNFLYLASHYEKLKGSPEDNEQKQLFVEQHKHYLDEIIEQISEFSKRVILADANLDKVLSAYNKHRDKPIREQAENIIHLFTLTNLGAPAAFKYFDTTIDRKRYTSTKEVLDATLIHQSITGLYETRIDLSQLGGD

SEQ ID NO: 229 - protein, 1300 aa, Kandleria vitulina
NNKIYNIGLDIGDASVGWAVVDEHYNLLKRHGKHMWGSRLFTQANTAVERRSSRSTRRRYNKRRERIRLLRGIMEDMVLDVDPTFFIRLANVSFLDQEDKKDYLKSNYNLFIDKDFNDKTYYDKYPTIYHLRKHLCESKEKEDPRLIYLALHHIVKYRGNFLYEGQKFSMDVSNIEDKMIDVLRQFNEINLFEYVEDKKIDEVLNVLKEPLSKKHKADKAFALFDTTKDNKAAYKELCAALAGNKFNVTKMLKEAELHDEDEKDISFKFSDATFDDAFVEKQPLLGDCVEFIDLLHDIYSWVELQNILGSAHTSEPSISAAMIQRYEDHKNDLKLLKDVIRKYLPKKYFEVFRDEKSKKNNYCNYINHKTPVDEFYKYIKKLIEKIDDPDVKTILNKIELESFMLKQNSRTNGAVPYQMQLDELNKILENQSVYYSDLKDNEDKIRSILTFRIPYYFGPLITKDRQFDWIIKKEGKENERILPWNANEIVDVDKTADEFIKRMRNFCTYFPDEPVLAKNSLTVSKYEVLNEINKLRINDHLIKRDIKDKMLHTLFMDHKSISANAMKKWLVKNQYFSNTDDIKIEGFQKENACSTSLTPWIDFTKIFGEINNSNYELIEKIIYDVTVFEDKKILRRRLKKEYDLDEEKIKKILKLKYSGWSRLSKKLLSGIKTKRTPETVLEVMETNMNLMQVINDEKLGFKKTIDDANSTSVSGKFSYAEVQELAGSPAIKRGIWQALLIVDEIKKIMKHEPAHVYIEFARNEDKERKDSFVNQMLKLYKDFEDEANKHLKGEDAKSKIRSERLKLYYTQMGKCMYTGKSLDIDRLDTYQVDHIVPQSLLKDDSIDNKVLVLSSENQRKLDDLVIPEMIRNKMFGFWNKLYENKIISPKKFYSLIKSEYSDKDKERFINRQIVETRQITKHVAQIISNHYETTKVVTVRADLSHAFRERYHIYKNRDINDFHHAHDAYIATILGTYIGHRFESLDAKYIYGEYQKIFRNKNKDKKDGFILNSMRNLYADKDTGEVVWDPEWISRIKKCFYYKDCFVTKKLEENNGSFFNTVRPNDEHSEKGAKVPVNKLRSNVHKYGGFEGLKYSIVAIKGKKKKGKKIIDVNKLVGIPLMYKNVDDETKINYIKESEGLEEVKIIKEILKNQLIEINGGLFYVTSEIVNARQLILDFNCTRIIDGIYKAMKYKNYSELSQEEIMNVYDIFVEKLKLYYPTYKNIATNFENFENISDEEKCEVIQMLVVMHAGPQNGNITFDDFKLSNRLGRLNCKTISLTTVFIADSPTGMYSKKYKL

SEQ ID NO: 230 - protein, 1301 aa, Kandleria vitulina
NNKIYNIGLDIGDASVGWAVVDEHYNLLKRHGKHMWGSRLFTQANTAVERRSSRSTRRRYNKRRERIRLLREIMEDMVLDVDPTFFIRLANVSFLDQEDKKDYLKSNYNLFIDKDFNDKTYYDKYPTIYHLRKHLCESKEKEDPRLIYLALHHIVKYRGNFLYEGQKFSMDVSNIEDKMIDVLRQFNEINLFEYVEDKKIDEVLNVLKEPLSKKHKAEKAFALFDTTKDNKAAYKELCAALAGNKFNVTKMLKEAELHDEDEKDISFKFSDATFDDAFVEKQPLLGDCVEFIDLLHDIYSWVELQNILGSAHTSEPSISAAMIQRYEDHKNDLKLLKDVIRKYLPKKYFEVFRDEKSKKNNYCNYINHKTPVDEFYKYIKKLIEKIDDPDVKTILNKIELESFMLKQNSRTNGAVPYQMQLDELNKILENQSVYYSDLKDNEDKIRSILTFRIPYYFGPLITKDRQFDWIIKKEGKENERILPWNANEIVDVDKTADEFIKRMRNFCTYFPDEPVMAKNSLTVSKYEVLNEINKLRINDHLIKRDMKDKMLHTLFMDHKSISANAMKKWLVKNQYFSNTDDIKIEGFQKENACSTSLTPWIDFTKIFGKINESNYDFIEKIIYDVTVFEDKKILRRRLKKEYDLDEEKIKKILKLKYSGWSRLSKKLLSGIKTKRTPETVLEVMETNMNLMQVINDEKLGFKKTIDDANSTSVSGKFSYAEVQELAGSPAIKRGIWQALLIVDEIKKIMKHEPAHVYIEFARNEDKERKDSFVNQMLKLYKDFEDEANKHLKGEDAKSKIRSERLKLYYTQMGKCMYTGKSLDIDRLDTYQVDHIVPQSLLKDDSIDNKVLVLSSENQRKLDDLVIPSSIRNKMYGFWEKLFNNKIISPKKFYSLIKTEFNEKDQERFINRQIVETRQITKHVAQIIDNHYENTKVVTVRADLSHQFRERYHIYKNRDINDFHHAHDAYIATILGTYIGHRFESLDAKYIYGEYKRIFRQKNKGKNDGFILNSMRNIYADKDTGEIVWDPNYIDRIKKCFYYKDCFVTKKLEENNGTFFNTVLPNDTNSDKDATVPVNKYRSNVNKYGGFSGVNSFIVAIKGKKKKGKKVIEVNKLTGIPLMYKNADEEIKINYLKQAEDLEEVQIGKEILKNQLIEKDGGLYYIVAEIINAKQLILNESQTKLVCEIYKAMKYKNYDNLDSEKIIDLYRLLINKMELYYPEYRKQLVKKFEDLKVISIEEKCNIIQILATLHCNSSIGKIMYSDFKISTTIGRLNGRTISLDISFIAESPTGMYSKKYKL

SEQ ID NO: 231 - protein, 1304 aa, Lactobacillus animalis
LKKDYSIGLDIGTNSVGHAVVTDDYKVPTKKMKVFGDTSKKTIKKNMLGVLLFNEGQTAADTRLKRGARRRYTRRKNRLRYLQEIFAPALAKVDPNFFYRLEESSLVAEDKKYDVYPIFGKREEELLYHDTHKTIYHLRSELANNDRPADLRLVYLALAHIIKYRGNFLLEGEIDLRTTDINKVFAEFSETLNENSDENLGKLDVADIFKDNTFSKTKKSEELLKLSGKKNQLAHQLFKMMVGNMGSFKKVLGTDEEHKLSFGKDTYEDDLNDLLAEAGDQYLDIFVAAKKVYDAAILASILDVKDTQTKTVFSQAMIERYEEHQKDLIELKRVFKKYLPEKCHDFFSEPKISGYAGYIDGKVSEEDFYKYTKKTLKGIPETEEILQKIDANNYLRKQRTFDNGAIPHQVHLKELVAIVENQGKYYPFLRENKDKFEKILNFRIPYYVGPLARGNSKFAWLTRAGEGKITPYNFDEMIDKETSAEDFIKRMTINDLYLPTEPVLPKHSLLYERYTIFNELAGVRYVTENGEAKYFDAQTKRSIFELFKLDRKVSEKMVIKHLKVVMPAIRIQALKGLDNGKFNASYGTYKDLVDMGVAPELLNDEVNSEKWEDIIKTLTIFEGRKLIKRRLENYRDFLGEDILRKLSRKKYTGWGRLSAKLLDGIYDKKTHKTILDCLMEDYSQNFMQLINDDTYSFKETIKNAQVIEKEETLAKTVQELPGSPAIKKGILQSLEIVDEIIKVMGYKPKSIVVEMARETQTHGTRKREDRVQQIVKNLKELPKPSNAELSDERKYLYCLQNGRDMYTGAPLDYDHLQFYDVDHIIPQSFLKDDSIENKVLTIKKENVRKTNGLPSEAVIQKMGSFWKKLLDAGAMTNKKYDNLRRNLHGGLNEKLKERFIERQLVETRQITKYVAQLLDQRLNYDGNGVELDEKIAIVTLKAQLASQFRSEFKLRKVRALNNLHHAHDAYLNAVVANLIMAKYPELEPEFVYGKYRKTKFKGLGKATAKNTLYANVLYFLKENEVYPFWDKARDLPTIKRYLYRAQVNKVRKAERQTGGFSDEMLVPKSDSGKLLPRKEGLDPVKYGGYAKAVESYAVLITADEVKKGKTKKVKTLVNIPIIDSKKYEADPTAYLASRGYTNVTNSFILPKYSLLEDPEGRRRYLASKEFQKANELILPQHLVELLYWVNAKDGEQKLEDHKAEFKELFDKIMEFADKYVVAPKNSEKIRRLYEENQDATPMELGKNFVELLRYTADGAASDFKFFGENIPRKRYNSAGSLLNGTLIYQSKTGLYETRIDLGKL

SEQ ID NO: 232 - protein, 1292 aa, Lactobacillus curvatus
MSRPYNIGLDIGTSSIGWSVVDDQSKLVSVRGKYGYGVRLYDEGQTAAERRSFRTTRRRLKRRKWRLGLLREIFEPYITPVDDTFFLRKKQSNLSPKDQRKQTSLFNDRTDRAFYDDYPTIYHLRYKLMTEKRQFDIREIYLAMHHIVKYRGHFLNEAPVSSFKSSEINLVAHFDRLNTIFADLFSESGFTDKLAEVKALLLDNHQSASNRQRQALLLIYTPSKQNKAIATELLKAILGLKAKFNVLTGIEAEDVKTWTLTFNAENFDEEMVKLESSLDDNAHQIIESLQELYSGVLLAGIVPENQSLSQAMITKYDDHQKHLKMLKAVREALAPEDRQRLKQAYDQYVDGKSKEDFYGDITKALKNNPDHPIVSEIKKLIELDQFMPKQRTKDNGAIPHQLHQQELDRIIENQQQYYPWLAELNPNKLDELVAFRVPYYVGPLQQQSSDAKFAWMIRKAEGQITPWNFDDKVDRQASANEFIKRMTTTDTYLLAEDVLPKQSLIYQRFEVLNELNGLKIDDQPITTELKQAIFTDLFMQKTSVTVKNIQDYLVSEKRYASRPAITGLSDENKFNSRLSTYHDLKTIVGDAVDDVDKQADLEKCIEWSTIFEDGKIYSAKLNEIDWLTDQQRVQLAAKRYRGWGRLSAKLLTQIVNANGQRIMDLLWTTDNFMRIVHSEDFDKLITEANQMMLAENDVQDVINDLYTSPQNKKALRQILLVVNDIQKAMKGQAPERILIEFAREDEVNPRLSVQRKRQVEQVYQNISELEIRNELKDLSNSALSNTRLFLYFMQGGRDMYTGDSLNIDRLSTYDIDHILPQSFIKDNSLDNRVLVSQRMNRSKADQVPSVELGQKMQIQWEQMLRAGLITKKKYDNLTLNPDMKGFINRQLVETRQVIKLATNLLMEQYGEDNIELITVKSGLTHQMRTEFDFPKNRNLNNHHHAFDAYLTAFVGLYLLKRYPKLKPYFVYGEYQKASQQDKRNFNFLNGLKKDELVDENTEAVIWNKESGLAYLNKIYQFKKILVTREVHENSGALFNQTLYAAKDDKASGQLIPAKQDRPTALYGGYSGKTVAYMCIVRIKNKKGDLYKVCGVETSWLAQLKQKKAFLKQKISPQFTKVKKQKGTIVKVVEDFEVIAPHILINQRFFDNGQELTLGSHNEQELILDKTAVKLLNGALPLTQSEELAEQVYDEILDQVMHYFPLYDTNQFRAKLSAGKAADGNKMVQVGQQVILDRVLIGLHANAAVSDLGVLKISTPLGKMQQPSGISDTQIIYQSPTGLFERRVALRDL

SEQ ID NO: 233 - protein, 1291 aa, Lactobacillus farciminis
KEQPYNIGLDIGTGSVGWAVTNDNYDLLNIKKKNLWGVRLFEGAQTAKETRLNRSTRRRYRRRKNRINWLNEIFSEELANTDPSFLIRLQNSWVSKKDPDRKRDKYNLFIDNPYTDKEYYREFPTIFHLRKELIINKNKADIRLVYLALHNILKYRGNFTYEHQKFNISTLNSNLSKELIELNQQLIKYDISFPDNCDWNHISDILIGRGNATQKSSNILNNFTKETKKLLKEVINLILGNVAHLNTIFKTSLTKDEEKLSFSGKDIESKLDDLDSILDDDQFTVLDTANRIYSTITLNEILNGESYFSMAKVNQYENHAIDLCKLRDMWHTTKNEKAVGLSRQAYDDYINKKKELYTSLKKFLKVALPTNLAKEAEEKISKGTYLVKPRNSENGVVPYQLNKIEMEKIIDNQSQYYPFLKENKEKLLSILSFRIPYYVGPLQSSEKNPFAWMERKSNGHARPWNFDEIVDREKSSNKFIRRMTVTDSYLVGEPVLPKNSLIYQRYEVLNELNNIRITENLKTNPTGSRLTVETKQHIYNELFKNYKKITVKKLTKWLIAQGYYKNPILIGLSQKDEFNSTLTTYLDMKKIFGSSFMENNKNYNQIEELIEWLTIFEDKQILNEKLHSSNYSYTSDQIKKISNMRYKGWGRLSKKILTCITTETNTPKSLQLSNDLMWTTNNNFISIISNDKYDFKNYIENHNLNKNEDQNISNLVNDIHVSPALKRGITQSIKIVQEIVKFMGHAPKYIFIEVTRETKTTSRGKRIQRLQSKLLNKANGLVPEELKKHKNDLSSERIMLYFLQNGKSLYSEESLNINKLSDYQVDHILPRTYIPDDSLENKALVLAKENQRKADDLLLNSNVIDKNLERWTYMLNNNMMGLKKFKNLTRRVITDKDKLGFIHRQLVQTSQMVKGVANILNSMYKNQGTTCIQARANLSTAFRKALELVKNRNINDFHHAQDAYLASFLGTYRLRRFPTDEMLLMNGEYNKFYGKELYSKKSRKNGFIISPLVNGTTQDRNTGEIIWNVGFRDKILKIFNYHQCNVTRKTEIKTGQFYDQTIYSPKNPKKLIAQKKDMDPNIYGGFSGDNKSSITIVKIDNNKIKPVAIPIRLINDKKTLQNWLEENVKHKKSIQIIKNNVPIGQIIYSKKVGLLSREIANRQQLILPPEHSALLRILQIPDEDPDQILAFYDKNILVEILQELITKMKKFYPFYKNEQEFLASFNQATTSEKINSLEELITLLHANSTSAHLIFNNIEKKAFGRKTHGLTDTDFIYQSVTGLYETRIHIE

SEQ ID NO: 234 - protein, 1327 aa, Listeria innocua
MKKPYTIGLDIGTNSVGWAVLTDQYDLVKRKMKIAGDSEKKQIKKNFWGVRLFDEGQTAADRRMARTARRRIERRRNRISYLQGIFAEEMSKTDANFFCRLSDSFYVDNEKRNSRHPFFATIEEEVEYHKNYPTIYHLREELVNSSEKADLRLVYLALAHIIKYRGNFLIEGALDTQNTSVDGIYKQFIQTYNQVFASGIEKLEDNKDVAKILVEKVTRKEKLERILKLYPGEKSAGMFAQFISLIVGSKGNFQKPFDLIEKSDIECAKDSYEEDLESLLALIGDEYAELFVAAKNAYSAVVLSSIITVAETETNAKLSASMIERFDTHEEDLGELKAFIKLHLPKHYEEIFSNTEKHGYAGYIDGTKQADFYKYMKMTLENIEGADYFIAKIEKENFLRKQRTFDNGAIPHQLHLEELEAILHQQAKYYPFLKENYDKIKSLVTFRIPYFVGPLANGQSEFAWLTRKADGEIRPWNIEEKVDFGKSAVDFIEKMTNKDTYLPKENVLPKHSLCYQKYLVYNELTKVRYINDQGKTSYFSGQEKEQIFNDLFKQKRKVKKKDLELFLRNMSHVESPTIEGLEDSFNSSYSTYHDLLKVGIKQEILDNPVNTEMLENIVKILTVFEDKRMIKEQLQQFSDVLDGVVLKKLERRHYTGWGRLSAKLLMGIRDKQSHLTILDYLMDDGLNRNLMQLINDSNLSFKSIIEKEQVTTADKDIQSIVADLAGSPAIKKGILQSLKIVDELVSVMGYPPQTIVVEMARENQTTGKGKNNSRPRYKSLEKAIKEFGSQILKEHPTDNQELRNNRLYLYYLQNGKDMYTGQDLDIHNLSNYDIDHIVPQSFITDNSIDNLVLTSSAGNREKGDDVPPLEIVRKRKVFWEKLYQGNLMSKRKFDYLTKAERGGLTEADKARFIHRQLVETRQITKNVANILHQRFNYEKDDHGNTMKQVRIVTLKSALVSQFRKQFQLYKVRDVNDYHHAHDAYLNGVVANTLLKVYPQLEPEFVYGDYHQFDWFKANKATAKKQFYTNIMLFFAQKDRIIDENGEILWDKKYLDTVKKVMSYRQMNIVKKTEIQKGEFSKATIKPKGNSSKLIPRKTNWDPMKYGGLDSPNMAYAVVIEYAKGKNKLVFEKKIIRVTIMERKAFEKDEKAFLEEQGYRQPKVLAKLPKYTLYECEEGRRRMLASANEAQKGNQQVLPNHLVTLLHHAANCEVSDGKSLDYIESNREMFAELLAHVSEFAKRYTLAEANLNKINQLFEQNKEGDIKAIAQSFVDLMAFNAMGAPASFKFFETTIERKRYNNLKELLNSTIIYQSITGLYESRKRLDD

SEQ ID NO: 235 - protein, 1327 aa, Listeria innocua
MKKPYTIGLDIGTNSVGWAVLTDQYDLVKRKMKIAGDSEKKQIKKNFWGVRLFDEGQTAADRRMARTARRRIERRRNRISYLQGIFAEEMSKTDANFFCRLSDSFYVDNEKRNSRHPFFATIEEEVEYHKNYPTIYHLREELVNSSEKADLRLVYLALAHIIKYRGNFLIEGALDTQNTSVDGIYKQFIQTYNQVFASGIEKLEDNKDVAKILVEKVTRKEKLERILKLYPGEKSAGMFAQFISLIVGSKGNFQKPFDLIEKSDIECAKDSYEEDLESLLALIGDEYAELFVAAKNAYSAVVLSSIITVAETETNAKLSASMIERFDTHEEDLGELKAFIKLHLPKHYEEIFSNTEKHGYAGYIDGTKQADFYKYMKMTLENIEGADYFIAKIEKENFLRKQRTFDNGAIPHQLHLEELEAILHQQAKYYPFLKENYDKIKSLVTFRIPYFVGPLANGQSEFAWLTRKADGEIRPWNIEEKVDFGKSAVDFIEKMTNKDTYLPKENVLPKHSLCYQKYLVYNELTKVRYINDQGKTSYFSGQEKEQIFNDLFKQKRKVKKKDLELFLRNMSHVESPTIEGLEDSFNSSYSTYHDLLKVGIKQEILDNPVNTEMLENIVKILTVFEDKRMIKEQLQQFSDVLDGVVLKKLERRHYTGWGRLSAKLLMGIRDKQSHLTILDYLMDDGLNRNLMQLINDSNLSFKSIIEKEQVTTADKDIQSIVADLAGSPAIKKGILQSLKIVDELVSVMGYPPQTIVVEMARENQTTGKGKNNSRPRYKSLEKAIKEFGSQILKEHPTDNQELRNNRLYLYYLQNGKDMYTGQDLDIHNLSNYDIDHIVPQSFITDNSIDNLVLTSSAGNREKGDDVPPLEIVRKRKVFWEKLYQGNLMSKRKFDYLTKAERGGLTEADKARFIHRQLVETRQITKNVANILHQRFNYEKDDHGNTMKQVRIVTLKSALVSQFRKQFQLYKVRDVNDYHHAHDAYLNGVVANTLLKVYPQLEPEFVYGDYHQFDWFKANKATAKKQFYTNIMLFFAQKDRIIDENGEILWDKKYLDTVKKVMSYRQMNIVKKTEIQKGEFSKATIKPKGNSSKLISRKTNWDPMKYGGLDSPNMAYAVVIEYAKGKNKLVFEKKIIRVTIMERKAFEKDEKAFLEEQGYRQPKVLAKLPKYTLYECEEGRRRMLASANEAQKGNQQVLPNHLVTLLHHVANCEVSDGKSLDYIESNREMFAELLAHVSEFAKRYTLAEANLNKINQLFEQNKEGDIKAIAQSFVDLMAFNAMGAPASFKFFETTIERKRYNNLKELLNSTIIYQSITGLYESRKRLDD

SEQ ID NO: 236 - protein, 1327 aa, Listeria innocua; identical to SEQ ID NO: 235

SEQ ID NO: 237 - protein, 1101 aa, Listeria innocua
LKLYPGEKSTGMFAQFISLIVGSKGNFQKPFDLIEKSDIECAKDSYEEDLESLLALIGDEYAELFVAAKNAYSAVVLSSIITVAETETNAKLSASMIERFDTHEEDLGELKAFIKLHLPKHYEEIFSNTEKHGYAGYIDGTKQADFYKYMKTTLENIEGADYFIAKIEKENFLRKQRTFDNGAIPHQLHLEELEAILHQQAKYYPFLKENYDKIKSLVTFRIPYFVGPLANGQSEFAWLTRKADGEIRPWNIEEKVDFGKSAVDFIEKMTNKDTYLPKENVLPKHSLCYQKYLVYNELTKVRYINDQGKTSYFSGQEKEQIFNDLFKQKRKVKKKDLELFLRNMSHVESPTIEGLEDSFNSSYSTYHDLLKVGIKQEILDNPVNTEMLENIVKILTVFEDKRMIKEQLQQFSDVLDGVVLKKLERRHYTGWGRLSAKLLMGIRDKQSHLTILDYLMDDGLNRNLMQLINDSNLSFKSIIEKEQVTTADKDIQSIVADLAGSPAIKKGILQSLKIVDELVSVMGYPPQTIVVEMARENQTTGKGKNNSRPRYKSLEKAIKEFGSQILKEHPTDNQELKNNRLYLYYLQNGKDMYTGQDLDIHNLSNYDIDHIVPQSFITDNSIDNLVLTSSAGNREKGNDVPPLEIVQKRKVFWEKLYQGNLMSKRKFDYLTKAERGGLTEADKARFIHRQLVETRQITKNVANILHQRFNYGKDDHGNTMKQVRIVTLKSALVSQFRKQFQLYKVRGVNDYHHAHDAYLNGVVANTLLKVYPQLEPEFVYGDYHQFDWFKANKATAKKQFYTNIMLFFAQKDRIIDENGEILWDKKYLDTVKKVMSYRQMNIVKKTEIQKGEFSKATIKPKGNSSKLIPRKTNWDPMKYGGLDSPNMAYAVVIEYAKGKNKLVFEKKIIRVTIMERKAFEKDEKAFLEEQGYRQPKVLAKLPKYTLYECEEGRRRMLASANEAQKGNQQVLPNHLVTLLHHAANCEVSDGKSLDYIESNREMFAELLAHVSEFAKRYTLAEANLNKINQLFEQNKEGDIKAIAQSFVDLMAFNAMGAPASFKFFETTIERKRYNNLKELLNSTIIYQSITGLYESRKRLDD

SEQ ID NO: 238 - protein, 1327 aa, Listeria ivanovii
MRKPYTIGLDIGTNSVGWAVLTDQYNLVKRKMKVAGSAEKKQIKKNFWGVRLFDEGEVAAGRRMNRTTRRRIERRRNRIAYLQEIFAAEMAEVDANFFYRLEDSFYIESEKRHSRHPFFATIEEEVAYHEEYKTIYHLREKLVNSSDKADLRLVYLALAHIIKYRGNFLIEGMLDTKNTSVDEVFKQFIQTYNQIFASDIERLEENKEVAEILSEKLTRREKLDKILKLYTGEKSTGMFARFINLIIGSKGDFKKVFDLDEKAEIECAKDTYEEDLEALLAKIGDEYAEIFVAAKSTYNAVVLSNIITVTDTETKAKLSASMIERFDKHAKDLKRLKAFFKMQLPEKFNEVFNDIEKDGYAGYIDGTTQEKFYKYMKKMLANIDGADYFIDQIEEENFLRKQRTFDNGTIPHQLHLEELEAILHQQAKYYPFLRKDYEKIRSLVTFRIPYFIGPLANGQSDFAWLTRKADGEIRPWNIEEKVDFGKSAIDFIEKMTNKDTYLPKENVLPKHSLCYQKYMVYNELTKIRYIDDQGKTHHFSGQEKQQIFNGLFKQQRKVKKKDLERFLYTINHIESPTIEGVEDAFNSSFATYHDLQKGGVTQEILDNPLNADMLEEIVKILTVFEDKRMIKEQLQSFSDVLDGTILKKLERRHYTGWGRLSAKLLTGIRDKHSHLTILDYLMDDGLNRNLMQLINDSNLSFKSIIEKEQVSTADKGIQSIVAELAGSPAIKKGILQSLKIVDELVGIMGYPPQTIVVEMARENQTTGKGKNNSKPRFISLEKAIKEFGSQILKEHPTDNQCLKNDRLYLYYLQNGKDMYTGKELDIHNLSNYDIDHIIPQSFITDNSIDNRVLVSSTANREKGDNVPLLEVVRKRKAFWEKLYQAKLMSKRKFDYLTKAERGGLTEADKANFIQRQLVETRQITKNVANILYQRFNCKQDENGNEVEQVRIVTLKSTLVSQFRKQFQLYKVREVNDYHHAHDAYLNGVVANTLLKVYPQLEPEFVYGDYHQFDWFKANKATAKKQFYTNIMRFFAKENQIIDKNGEILWDNRYLDTIKKVLSYRQMNIVKKTEIQKGEFSNATVNPKGNSSKLISRKADWNPIKYGGFDGSNMAYSIVIEYEKRKKKTVIKKELIQINIMERVAFEKDQKAFLEEKGYYSPKVLTKIPKYTLYECENGRRRMLGSANEAQKGNQMVLPNHLMTLLYHAKNCEANDGESLAYIEMHREMFAELLAYISEFAKRYTLANDRLEKINMFFEQNKKGDIKVIAKSFDKLKVFNAFGAPRDFEFFETTIKRKRYYNIKELLNATIIYQSITGLYEARKRLED

SEQ ID NO: 239 - protein, 952 aa, Listeria ivanovii
MKKMLANIDGADYFIDQIEEENFLRKQRTFDNGTIPHQLHLEELEAILHQQAKYYPFLRKDYEKIRSLVTFRIPYFIGPLANGQSDFAWLTRKADGEIRPWNIEEKVDFGKSAIDFIEKMTNKDTYLPKENVLPKHSLCYQKYMVYNELTKIRYIDDQGKTHHFSGQEKQQIFNGLFKQQRKVKKKDLERFLYTINHIESPTIEGVEDAFNSSFATYHDLQKGGVTQEILDNPLNADMLEEIVKILTVFEDKRMIKEQLQSFSDVLDGTILKKLERRHYTGWGRLSAKLLTGIRDKHSHLTILDYLMDDGLNRNLMQLINDSNLSFKSIIEKEQVSTADKGIQSIVAELAGSPAIKKGILQSLKIVDELVGIMGYPPQTIVVEMARENQTTGKGKNNSKPRFISLEKAIKEFGSQILKEHPTDNQCLKNDRLYLYYLQNGKDMYTGKELDIHNLSNYDIDHIIPQSFITDNSIDNRVLVSSTANREKGDNVPLLEVVRKRKAFWEKLYQAKLMSKRKFDYLTKAERGGLTEADKANFIQRQLVETRQITKNVANILYQRFNCKQDENGNEVEQVRIVTLKSTLVSQFRKQFQLYKVREVNDYHHAHDAYLNGVVANTLLKVYPQLEPEFVYGDYHQFDWFKANKATAKKQFYTNIMRFFAKENQIIDKNGEILWDNRYLDTIKKVLSYRQMNIVKKTEIQKGEFSNATVNPKGNSSKLISRKADWNPIKYGGFDGSNMAYSIVIEYEKRKKKTVIKKELIQINIMERVAFEKDQKAFLEEKGYYSPKVLTKIPKYTLYECENGRRRMLGSANEAQKGNQMVLPNHLMTLLYHAKNCEANDGESLAYIEMHREMFAELLAYISEFAKRYTLANDRLEKINMFFEQNKKGDIKVIAKSFDKLKVFNAFGAPRDFEFFETTIKRKRYYNIKELLNATIIYQSITGLYEARKRLED

SEQ ID NO: 240 - protein, 1327 aa, Listeria monocytogenes
MKNPYTIGLDIGTNSVGWAVLTNQYDLVKRKMKVAGNSDKKQIKKNFWGVRLFDDGQTAVDRRMNRTARRRIERRRNRISYLQEIFAVEMANIDANFFCRLNDSFYVDSEKRNSRHPFFATIEEEVAYHDNYRTIYHLREKLVNSSEKADLRLVYLALAHIIKYRGNFLIEGALDTKNTSVDEVYKQFIETYNQVFMSNIEKVEENIEVANILAGKFTRREKFERILQLYPGEKSTGMFAQFISLIVGSKGNFQKVFDLIEKTDIECAKDSYEEDLETLLAIIGDEYAELFVAAKNTYNAVVLSSIITVTDTETNAKLSASMIERFDAHEKDLVELKAFIKLNLPKQYEEIFSNAAIDGYAGYIDGTKQVDFYKYLKTILENIEGSDYFIAKIEEENFLRKQRTFDNGAIPHQLHLEELEAIIHQQAKYYPFLKEDYDKIKSLVTFRIPYFVGPLANGQSEFAWLTRKADGEIRPWNIEEKVDFGKSAVDFIEKMTNKDTYLPKENVLPKHSLCYQKYMVYNELTKIRYIDDQGKTNYFSGREKQQVFNDLFKQKRKVKKKDLELFLRNINHIESPTIEGLEDSFNASYATYHDLLKVGMKQEILDNPLNTEMLEDIVKILTVFEDKPMIKEQLQQFSDVLDGGVLKKLERRHYTGWGRLSAKLLVGIREKQSHLTILDYLMDDGLNRNLMQLINDSNLSFKSIIEKEQVSTTDKDLQSIVAELAGSPAIKKGILQSLKIVDELVSIMGYPPQTIVVEMARENQTTGKGKNNSKPRYKSLEKAIKEFGSQILKEHPTDNQELKNNRLYLYYLQNGKDMYTGQELDIHNLSNYDIDHIVPQSFITDNSIDNLVLTSSAGNREKGGDVPPLEIVRKRKVFWEKLYQGNLMSKRKFDYLTKAERGGLTEADKARFIHRQLVETRQITKNVANILYQRFNKETDNHGNTMEQVRIVTLKSALVSQFRKQFQLYKVREVNGYHHAHDAYLNGVVANTLLKVYPQLEPEFVYGEYHQFDWFKANKATAKKQFYTNIMLFFAQKERIIDENGEILWDKKYLETIKKVLDYRQMNIVKKTEIQKGEFSKATIKPKGNSSKLIPRKENWDPMKYGGLDSPNMAYAVIIEHAKGKKKIVIEKKLIQINIMERKMFEKDEEAFLEEKGYRHPKVLTKLPKYTLYECEKGRRRMLASANEAQKGNQLVLSNHLVSLLYHAKNCEASDGKSLKYIEAHRETFSELLAQVSEFATRYTLADANLSKINNLFEQNKEGDIKAIAQSFVDLMAFNAMGAPASFKFFEATIDRKRYTNLKELLSSTIIYQSITGLYESRKRLDD

SEQ ID NO: 241 - protein, 1327 aa, Listeria monocytogenes
MKNPYTIGLDIGTNSVGWAVLTDQYDLVKRKMKVAGNSDKKQIKKNFWGVRLFDDGQTAVDRRMNRTARRRIERRRNRISYLQEIFAVEMANIDANFFCRLNDSFYVDSEKRNSRHPFFATIEEEVAYHKNYRTIYHLREELVNSSEKADLRLVYLALAHIIKYRGNFLIEGALDTKNTSVDEVYKQFIQTYNQVFMSNIEKVEENTEVASILAGKFTRREKFERILRLYPGEKSTGMFAQFISLIVGNKGNFQKVFNLVEKTDIECAKDSYEEDLEALLAIIGDEYAELFVAAKNTYNAVVLSSIITVTATETNAKLSASMIERFDAHEKELGELKAFIKLHLPKQYQEIFNNAEIDGYAGYIDGTKQVDFYKYLKTTLENVEGADYFITKIEEENFLRKQRTFDNGVIPHQLHLEELEAILHQQAKYYPFLREGYDKIKSLVTFRIPYFVGPLANGQSEFAWLTRKDDGEIRPWNIEEKVDFGKSAVDFIEKMTNKDTYLPKENVLPKHSLCYQKYMVYNELTKIRYIDDQGKTNYFSGREKQQIFNDLFKQKRKVKKKDLELFLRNINHIESPTIEGLEDSFNASYATYHDLLKVGLKQEILDNPLNTEILEDIVKILTVFEDKRMIKEQLEQFSDVLDGVVLKKLERRHYTGWGRLSAKLLVGIRDKQSHLTILDYLMDDGLNRNLMQLINDSNLSFKSIIEKEQVSTTDKDLQSIVADLAGSPAIKKGILQSLKIVDELVSIMGYPPQTIVVEMARENQTTGKGKNNSKPRYKSLEKAIKDFGSQILKEHPTDNQELKNNRLYLYYLQNGKDIYTGQELDIHNLSNYDIDHIVPQSFITDNSIDNLVLTSSAGNREKGGDVPPLEIVRKRKVFWEKLYQGNLMSKRKFDYLTKAERGGLTEADKARFIHRQLVETRQITKNVANILHQRFNKETDNHGNTMEQVRIVTLKSALVSQFRKQFQLYKVREVNDYHHAHDAYLNGVVANTLLKVYPQLEPEFVYGEYHQFDWFKANKATAKKQFYTNIMLFFAQKERIIDENGEILWDKKYLETIKKVLDYRQINIVKKTEIQKGEFSKATIKPKGNSSKLIPRKENWDPMKYGGLDSPNMAYAVIIEHAKGKKKIVIEKKLIQINIMERKMFEKDEEAFLEEKGYHQPKVLTKLPKYTLYECEKGRRRMLSSANEAQKGNQLVLSNHLVSLLYHAKNCEASDGKSLKYIEAHRETFSELLAQVSEFATKYTLADANLSKINNLFEQNKEGDIKAIAQSFVDLMAFNAMGAPASFKFFEATIDRKRYTNLKELLSSTIIYQSITGLYESRKRLDD

SEQ ID NO: 242 - protein, 1327 aa, Listeria monocytogenes
MKNPYTIGLDIGTNSVGWAVLTDQYDLVKRKMKVAGNSDKKQIKKNFWGVRLFDDGQTAVDRRMNRTARRRIERRRNRISYLQEIFAVEMANIDANFFCRLNDSFYVDSEKRNSRHPFFATIEEEVAYHKNYRTIYHLREELVNSSEKADLRLVYLALAHIIKYRGNFLIEGALDTKNTSVDEVYKQFIQTYNQVFMSNIEKVEENTEVASILAGKFTRREKFERILRLYPGEKSTGMFAQFISLIVGNKGNFQKVFNLVEKTDIECAKDSYEEDLEALLAIIGDEYAELFVAAKNTYNAVVLSSIITVTATETNAKLSASMIERFDAHEKELGELKAFIKLHLPKQYQEIFNNAEIDGYAGYIDGTKQVDFYKYLKTTLENVEGADYFITKIEEENFLRKQRTFDNGVIPHQLHLEELEAILHQQAKYYPFLREGYDKIKSLVTFRIPYFVGPLANGQSEFAWLTRKDDGEIRPWNIEEKVDFGKSAVDFIEKMTNKDTYLPKENVLPKHSLCYQKYMVYNELTKIRYIDDQGKTNYFSGREKQQIFNDLFKQKRKVKKKDLELFLRNINHIESPTIEGLEDSFNASYATYHDLLKVGLKQEILDNPLNTEILEDIVKILTVFEDKRMIKEQLEQFSDVLDGVVLKKLERRHYTGWGRLSAKLLVGIRDKQSHLTILDYLMDDGLNRNLMQLINDSNLSFKSIIEKEQVSTTDKDLQSIVADLAGSPAIKKGILQSLKIVDELVSIMGYPPQTIVVEMARENQTTGKGKNNSKPRYKSLEKAIKDFGSQILKEHPTDNQELKNNRLYLYYLQNGKDIYTGQELDIHNLSNYDIDHIVPQSFITDNSIDNLVLTSSAGNREKGGDVPPLEIVRKRKVFWEKLYQGNLMSKRKFDYLTKAERGGLTEADKARFIHRQLVETRQITKNVANILHQRFNKETDNHGNTMEQVRIVTLKSALVSQFRKQFQLYKVREVNDYHHAHDAYLNGVVANTLLKVYPQLEPEFVYGEYHQFDWFKANKATAKKQFYTNIMLFFAQKERIIDENGEILWDKKYLETIKKVLDYRQINIVKKTEIQKGEFSKATIKPKGNSSKLIPRKENWDPVKYGGLDSPNMAYAVIIEHAKGKKKIVIEKKLIQINIMERKMFEKDEEAFLEEKGYHQPKVLTKLPKYTLYECEKGRRRMLSSANEAQKGNQLVLSNHLVSLLYHAKNCEASDGKSLKYIEAHRETFSELLAQVSEFATKYTLADANLSKINNLFEQNKEGDIKAIAQSFVDLMAFNAMGAPASFKFFEATIDRKRYTNLKELLSSTIIYQSITGLYESRKRLDD

SEQ ID NO: 243 - protein, 1327 aa, Listeria monocytogenes
MKKPYTIGLDIGTNSVGWAVLTDQYDLVKRKMKISGDSEKKQIKKNFWGVRLFEKGETAAKRRMSRTARRRIERRRNRISYLQEIFAIQMNEVDDNFFNRLKESFYAESDKKYNRHPFFGTVEEEVAYYKDFPTIYHLRKELIDSQKKADLRLVYLALAHIIKYRGHFLIEGALDTKNTSIDEMFKQFLQIYNQVFANDIEKTEKNQEVAQILAEKFTRKDKLDKILSLYPGEKTTGVFAQFVNIIVGSTGKFKKHFNLHEKKDINCAEDTYDTDLESLLAIIGDEFAEVFVAAKNAYNAVVLSNIITVTDSTTRAKLSASLIERFENHKEDLKKMKRFVRTYLPEKYDEIFDDTEKHGYAGYISGTKQADFYKYMKATLEKIEGADYFIAKIEEENFLRKQRTFDNGVIPHQLHLEELEAILHQQAKYYPFLREDYEKIKSLVTFRIPYFVGPLAKGQSEFAWLTRKADGEIRPWNIEEKVDFGKSAVDFIEKMTNKDTYLPKENVLPKHSLCYQKYMVYNELTKVRYIDDQGKTNYFSGQEKQQIFNDLFKQKRKVKKKDLELFLRNINQIESPTIEGLEDSFNASYATYHDLLKVGMKQEILDNPLNTEMLEDIVKILTVFEDKRMIKEQLQQFSDVLDGTVLKKLERRHYTGWGRLSAKLLVGIRDKQSHLTILDYLMDDGLNRNLMQLINDSNLSFKSIIEKEQVSTTDKDLQSIVAELAGSPAIKKGILQSLKIVDELVSVMGYPPQTIVVEMARENQTTNKGKNNSKPRYKSLEKAIKEFGSQILKEHPTDNQELKNNRLYLYYLQNGKDMYTGQELDIHNLSNYDIDHIVPQSFITDNSVDNLVLTSSAGNREKGDNVPPLEIVQKRKIFWEKLYQGNLMSKRKFDYLTKAERGGLTEADKARFIHRQLVETRQITKNVANILHQRFNYKTDGNKDTMETVRIVTLKSALVSQFRKQFQFYKVREVNDYHHAHDAYLNGVVANTLLKVYPQLEPEFVYGEYHQFGWFKANKATAKKQFYTNIMLFFAQKDRIIDENGEILWDKRYLETVKKVLGYRQMNIVKKTEIQKGEFSNVTPNPKGKSNKLIPRKKDWDPIKYGGFDGSKMAYAIIIEYEKQKRKVRIEKKLIQINIMEREAFEKDEKTFLEEKGYHQPKVLIKVPKYTLYECKNGRRRMLGSANEAHKGNQMLLPNHLMALLYHAEKYEAIDGESLAYIEVHRALFDELLAYISEFARKYTLSNDRLDEINMLYERNKDGDVKSIAESFVSLKKFNAFGVHQDFSFFGTKIERKRDRKLNELLNSTIIYQSITGLYESRKRLDN

SEQ ID NO: 244 - protein, 1327 aa, Listeria monocytogenes
MKNPYTIGLDIGTNSVGWAVLTDQYDLVKRKMKVAGNSDKKQIKKNFWGVRLFDEGETAADRRMNRTARRRIERRRNRISYLQEIFALEMANIDANFFCRLNDSFYVDSEKRNSRHPFFATIEEEVAYHKNYRTIYHLREELVNSSEKADLRLVYLALAHIIKYRGNFLIEGALDTKNTSVDGVYKQFIQTYNQVFISNIEKMEENTTVADILAGKFTRKEKLERILQLYPGEKSTGMFAQFISLIVGSKGNFQKVFDLVEKTDIECAKDSYEEDLEALLAIIGDEYAELFVAAKNTYNAVVLSSIITVTDTETNAKLSASMIERFDAHEKDLSELKAFIKLHLPKQYEEIFSNVAIDGYAGYIDGTKQVDFYKYLKTLLENIEGADYFIAKIEEENFLRKQRTFDNGAIPHQLHLEELEAILHQQAKYYPFLKEAYDKIKSLVTFRIPYFVGPLANGQSDFAWLTRKADGEIRPWNIEEKVDFGKSAVDFIEKMTNKDTYLPKENVLPKHSLYYQKYMVYNELTKVRYIDDQGKTNYFSGQEKQQIFNDYFKQKRKVSKKDLEQFLRNMSHIESPTIEGLEDSFNSSYATYHDLLKVGIKQEVLENPLNTEMLEDIVKILTVFEDKRMIKEQLQQFSDVLDGAVLKKLERRHYTGWGRLSAKLLVGIRDKQSHLTILDYLMDDGLNRNLMQLINDSNLSFKSIIEKEQVSTTDKDLQSIVADLAGSPAIKKGILQSLKIVDELVSIMGYPPQTIVVEMARENQTTVKGKNNSRPRYKSLEKAIKEFGSQILKEHPTDNQELRNNRLYLYYLQNGKDMYTGQELDIHNLSNYDIDHIVPQSFITDNSIDNLVLTSSAGNREKGDDVPPLEIVRKRKVFWEKLFQGNLMSKRKFDYLTKAERGGLTEADKATFIHRQLVETRQITKNVANILHQRFNNETDNHGNNMEQVRIVMLKSALVSQFRKQFQLYKVREVNDYHHAHDAYLNGVVANTLLKVYPQLEPEFVYGEYHQFDWFKANKATAKKQFYTNIMLFFAQKERIIDENGEILWDKKYLETIKKVLDYRQMNIVKKTEIQKGEFSKATIKPKGNSSKLIPRKENWDPMKYGGLDSPNMAYAVIIEHAKGKKKVVFEKKIIRITIMERKAFEKDEKSFLEKQGYRQPKVLTKLPKYTLYECENGRRRMLASANEAQKGNQQVLKGQLITLLHHAKNCEASDGKSLDYIESNREMFGELLAHVSEFAKRYTLADANLSKINQLFEQNKDNDIKVIAQSFVNLMAFNAMGAPASFKFFEATIERKRYTNLKELLSATIIYQSITGLYEARKRLDG

SEQ ID NO: 245 - protein, 1327 aa, Listeria monocytogenes
MKNPYTIGLDIGTNSVGWAVLTNQYDLVKRKMKVAGNSDKKQIKKNFWGVRLFDDGQTAVDRRMNRTARRRIERRRNRISYLQEIFAVEMANIDANFFCRLNDSFYVDSEKRNSRHPFFATIEEEVAYHKNYRTIYHLREELVNSSEKADLRLVYLALAHIIKYRGNFLIEGALDTKNTSVDGVYEQFIQTYNQVFMSNIEKVEENIEVANILAGKFTRREKFERILQLYPGEKSTGMFAQFISLIVGSKGNFQKVFDLIEKTDIECAKDSYEEDLEALLAIIGDEYAELFVAAKNTYNAVVLSSIITVTATETNAKLSASMIERFDAHEKDLGELKAFIKLHLPKQYQEIFNNAAIDGYAGYIDGTKQVDFYKYLKTILENIEGADYFIAKIEEENFLRKQRTFDNGAIPHQLHLEELEAIIHQQAKYYPFLREDYEKIKSLVTFRIPYFVGPLAKGQSEFAWLTRKADGEIRPWNIEEKVDFGKSAVDFIEKMTNKDTYLPKENVLPKHSLCYQKYMVYNELTKVRYIDDQGKTNYFSGQEKQQIFNDLFKQKRKVKKKDLELFLRNINHIESPTIEGLEDSFNASYATYHDLLKVGMKQEILDNPLNTEMLEDIVKILTVFEDKPMIKEQLQQFSDVLDGGVLKKLERRHYTGWGRLSAKLLVGIREKQSHLTILDYLMDDGLNRNLMQLINDSNLSFKSIIEKEQVSTTDKDLQSIVADLAGSPAIKKGILQSLKIVDELVSIMGYPPQTIVVEMARENQTTGKGKNNSKPRYKSLEKAIKEFGSKILKEHPTDNQELKNNRLYLYYLQNGKDMYTGQELDIHNLSNYDIDHIVPQSFITDNSIDNLVLTSSAGNREKGGDVPPLEIVRKRKVFWEKLYQGNLMSKRKFDYLTKAERGGLTDADKARFIHRQLVETRQITKNVANILHQRFNNETDNHGNTMEQVRIVTLKSALVSQFRKQFQLYKVREVNDYHHAHDAYLNGVVANTLLKVYPQLEPEFVYGEYHQFDWFKANKATAKKQFYTNIMLFFGQKERIIDENGEILWDKKYLETIKKVLDYRQMNIVKKTEIQKGEFSKATIKPKGNSSKLIPRKENWDPMKYGGLDSPNMAYAVIIEHAKGKKKLIFEKKIIRITIMERKMFEKDEEAFLEEKGYRHPKVLTKLPKYTLYECEKGRRRMLASANEAQKGNQLVLSNHLVSLLYHAKNCEASDGKSLKYIEAHRETFSELLAQVSEFATRYTLADANLSKINNLFEQNKEGDIQAIAQSFVDLMAFNAMGAPASFKFFEATIDRKRYTNLKELLSSTIIYQSITGLYESRKRLDD

SEQ ID NO: 246 - protein, 1327 aa, Listeria monocytogenes
MKNPYTIGLDIGTNSVGWAVLTNQYDLVKRKMKVAGNSDKKQIKKNFWGVRLFDDGQTAVDRRMNRTARRRIERRRNRISYLQEIFAVEMANIDANFFCRLNDSFYVDSEKRNSRHPFFATIEEEVAYHKNYRTIYHLREELVNSSEKADLRLVYLALAHIIKYRGNFLIEGALDTKNTSVDGVYEQFILTYNQVFMSNIEKVEENIEVANILAGKFTRREKFERILQLYPGEKSTGMFAQFISLIVGSKGNFQKVFDLIEKTDIECAKDSYEEDLETLLAIIGDEYAELFVAAKNTYNAVVLSSIITVTDTETNAKLSASMIERFDAHEKDLVELKAFIKLNLPKQYEEIFSNAAIDGYAGYIDGTKQVDFYKYLKTTLENVEGADYFITKIEEENFLRKQRTFDNGVIPHQLHLEELEAILHQQAKYYPFLREDYEKIKSLVTFRIPYFVGPLAKGQSEFAWLTRKADGEIRPWNIEEKVDFGKSAVDFIEKMTNKDTYLPKENVLPKHSLCYQKYMVYNELTKIRYIDDQGKTNYFSGQEKQQIFNDLFKQKRKVKKKDLELFLRNINHVESPTIEGLEDSFNASYATYHDLMKVGIKQEILDNPLNTEMLEDIVKILTVFEDKRMIKEQLQQFSDVLDGTVLKKLERRHYTGWGRLSAKLLVGIRDKQSHLTILDYLMDDGLNRNLMQLINDSNLSFKSIIEKEQVSTADKDLQSIVADLAGSPAIKKGILQSLKVVEELVSVMGYPPQTIVVEMARENQTTNKGKNNSKPRYKSLEKAIKEFGSQILKEHPTDNQELKNNRLYLYYLQNGKDMYTGQELDIHNLSNYDIDHIVPQSFITDNSIDNLVLTSSAGNREKGDNVPPLEIVQKRKIFWEKLYQGNLMSKRKFDYLTKAERGGLTEADKARFIHRQLVETRQITKNVANILHQRFNYKTDDNEDTMEPVRIVTLKSALVSQFRKQFQLYKVREVNDYHHAHDAYLNGVVANTLLKVYPQLEPEFVYGEYHQFDWFKANKATAKKQFYTNIMLFFAQKERIIDENGEILWDKKYLETIKKVLNYRQMNIVKKTEIQKGEFSNQNPKPRGDSSKLIPKKTNLNPIKYGGFEGSNMAYAIIIEHEKRKKKVTIEKKLIQINIMERKAFEKDEKVFLEGKGYHQPKVLTKLPKYALYECENGRRRMLGSANEVHKGNQMLLPNHLMTLLYHAEKREAIDGESLAYIEAHKAVFGELLAHISEFARKYTLANDKLDEINMLYERNKDGDVKSIAESFVSLKKFNAFGVHKDFNFFGTTIKRKRDRKLKELLNSTIIYQSITGLYESRKRLDS

SEQ ID NO: 247 - protein, 1327 aa, Listeria monocytogenes
MKNPYTIGLDIGTNSVGWAVLTDQYDLVKRKMKVAGNSDKKQIKKNFWGVRLFDDGQTAVDRRMNRTARRRIERRRNRISYLQEIFAVEMANIDANFFCRLNDSFYVDSEKRNSRHPFFATIEEEVAYHKNYRTIYHLREELVNSSEKADLRLVYLALAHIIKYRGNFLIEGALDTKNTSVDGVYEQFIQTYNQVFMSNIEKVEENIEVANILAGKFTRREKFERILQLYPGEKSTGMFAQFISLIVGSKGNFQKVFDLIEKTDIECAKDSYEEDLETLLAIIGDEYAELFVAAKNTYNAVVLSSIITVNDTETNAKLSASMIERFDAHEKDLVELKAFIKLNLPKQYEEIFSNAAIDGYAGYIDGTKQVDFYKYLKTILENIEGSDYFIAKIEEENFLRKQRTFDNGAIPHQLHLEELEAIIHQQAKYYTFLKEDYDKIKSLVTFRIPYFVGPLANGQSEFAWLTRKADGEIRPWNIEEKVDFGKSAVDFIEKMTNKDTYLPKENVLPKHSLCYQKYMVYNELTKVRYIDDQGKTNYFSGQEKQQIFNDLFKQKRKVKKKDLELFLRNINQIESPTIEGLEDSFNASYATYHDLLKVGMKQEILDNPLNTEMLEDIVKILTVFEDKRMIKEQLQQFSDVLDGVVLKKLERRHYTGWGRLSAKLLVGIRDKQSHLTILEYLMDDGLNRNLMQLINDSNLSFKSIIEKEQVSTTDKDLQSIVAELAGSPAIKKGILQSLKIVDELVSIMGYPPQTIVVEMARENQTTGKGKNNSKPRYKSLEKAIKEFGSQILKEHPTDNQELKNNRLYLYYLQNGKDMYTGQELDIHNLSNYDIDHIVPQSFITDNSIDNLVLTSSAGNREKGGDVPPLEIVRKRKVFWEKLYQGNLMSKRKFDYLTKAERGGLTEADKARFIHRQLVETRQITKNVANILHQRFNKETDNHGNTMEQVRIVTLKSALVSQFRKQFQLYKVREVNDYHHAHDAYLNGVVANTLLKVYPQLEPEFVYGEYHQFDWFKANKATAKKQFYTNIMLFFAQKERIIDENGEILWDKKYLETIKKVLDYRQMNIVKKTEIQKGEFSKATIKPKGNSSKLIPRKENWDPMKYGGLDSPNMAYAVIIEHAKGKKRIVIEKKLIQINIMERKMFEKDEEAFLEEKGYRHPKVLTKLPKYTLYECEKGRRRMLASANEAQKGNQLVLSNHLVSLLYHAKNCEASDGKSLKYIEAHRETFSELLAQVSEFATRYTLADANLSKINNLFEQNKEGDIKAIAQSFVDLMAFNAMGAPASFKFFEATIDRKRYTNLKELLSSTIIYQSITGLYESRKRLDD

SEQ ID NO: 248 - protein, 1327 aa, Listeria monocytogenes
MKKPYTIGLDIGTNSVGWAVLTDQYDLVKRKMKISGDSEKKQIKKNFWGVRLFEKGETAAKRRMSRTARRRIERRRNRISYLQEIFAIQMNEVDDNFFNRLKESFYAESDKKYNRHPFFGTVEEEVAYYKDFPTIYHLRKELIDSQKKADLRLVYLALAHIIKYRGHFLIEGALDTKNTSIDEMFKQFLQIYNQVFANDIEKTEKNQEVAQILAEKFTRKDKLDKILSLYPGEKTTGVFAQFVNIIVGSTGKFKKHFNLHEKKDINCAEDTYDTDLESLLAIIGDEFAEVFVAAKNAYNAVVLSNIITVTDSTTRAKLSASLIERFENHKEDLKKMKRFVRTYLPEKYDEIFDDTEKHGYAGYISGTKQADFYKYMKATLEKIEGADYFIAKIEEENFLRKQRTFDNGVIPHQLHLEELEAILHQQAKYYPFLREDYEKIKSLVTFRIPYFVGPLAKGQSEFAWLTRKADGEIRPWNIEEKVDFGKSAVDFIEKMTNKDTYLPKENVLPKHSLCYQKYMVYNELTKVRYIDDQGKTNYFSGQEKQQIFNDLFKQKRKVKKKDLELFLRNINQIESPTIEGLEDSFNASYATYHDLLKVGMKQEILDNPLNTEMLEDIVKILTVFEDKRMIKEQLQQFSDVLDGTVLKKLERRHYTGWGRLSAKLLVGIRDKQSHLTILDYLMDDGLNRNLMQLINDSNLSFKSIIEKEQVSTADKDLQSIVADLAGSPAIKKGILQSLKIVDELVSVMGYPPQTIVVEMARENQTTNKGKNNSKPRYKSLEKAIKEFGSQILKEHPTDNQELKNNRLYLYYLQNGKDMYTGQELDIHNLSNYDIDHIVPQSFITDNSVDNLVLTSSAGNREKGDNVPPLEIVQKRKIFWEKLYQGNLMSKRKFDYLTKAERGGLTEADKARFIHRQLVETRQITKNVANILHQRFNYKTDGNKDTMETVRIVTLKSALVSQFRKQFQFYKVREVNDYHHAHDAYLNGVVANTLLKVYPQLEPEFVYGEYHQFDWFKANKATAKKQFYTNIMLFFAQKDRIIDENGEILWDKRYLETVKKVLGYRQMNIVKKTEIQKGEFSNVTPNPKGKSNKLIPRKKDWDPIKYGGFDGSKMAYAIIIEYEKQKRKVRIEKKLIQINIMEREAFEKDEKTFLEEKGYHQPKVLIKVPKYTLYECENGRRRMLGSANEAHKGNQMLLPNHLMALLYHAEKYEAIDGESLAYIEVHRALFDELLAYISEFARKYTLSNDRLDEINMLYERNKDGDVKSIAESFVSLKKFNAFGVHQDFSFFGTKIERKRDRKLNELLNSTIIYQSITGLYESRKRLDN

SEQ ID NO: 249 - protein, 1327 aa, Listeria monocytogenes
MKNPYTIGLDIGTNSVGWAVLTNQYDLVKRKMKVAGNSDKKQIKKNFWGVRLFDDGQTAVDRRMNRTARRRIERRRNRISYLQEIFAVEMANIDANFFCRLNDSFYVDSEKRNSRHPFFATIEEEVAYHKNYRTIYHLREELVNSSEKADLRLVYLALAHIIKYRGNFLIEGALDTKNTSVDGVYEQFIQTYNQVFMSNIEKVEENIEVANILARKFTRREKFERILQLYPGEKSTGMFAQFISLIVGSKGNFQKVFDLIEKTDIECAKDSYEEDLETLLAIIGDEYAELFVAAKNTYNAVVLSSIITVTDTETNAKLSASMIERFDAHEKDLVELKAFIKLNLPKQYEEIFSNAAIDGYAGYIDGTKQVDFYKYLKTILENIEGADYFIAKIEEENFLRKQRTFDNGAIPHQLHLEELEAIIHQQAKYYPFLREDYEKIKSLVTFRIPYFVGPLAKGQSEFAWLTRKADGEIRPWNIEEKVDFGKSAVDFIEKMTNKDTYLPKENVLPKHSLCYQKYMVYNELTKIRYIDDQGKTNYFSGQEKQQIFNDLFKQKRKVKKKDLELFLRNINHVESPTIEGLEDSFNASYATYHDLMKVGIKQEILDNPLNTEMLEDIVKILTVFEDKRMIKEQLQQFSDVLDGTVLKKLERRHYTGWGRLSAKLLVGIRDKQSHLTILDYLMDDGLNRNLMQLINDSNLSFKSIIEKEQVSTADKDLQSIVADLAGSPAIKKGILQSLKVVEELVSVMGYPPQTIVVEMARENQTTNKGKNNSKPRYKSLEKAIKEFGSQILKEHPTDNQELKNNRLYLYYLQNGKDMYTGQELDIHNLSNYDIDHIVPQSFITDNSIDNLVLTSSAGNREKGDNVPPLEIVQKRKIFWEKLYQGNLMSKRKFDYLTKAERGGLTEADKARFIHRQLVETRQITKNVANILHQRFNYKTDDNEDTMEPVRIVTLKSALVSQFRKQFQLYKVREVNDYHHAHDAYLNGVVANTLLKVYPQLEPEFVYGEYHQFDWFKANKATAKKQFYTNIMLFFAQKERIIDENGEILWDKKYLETIKKVLNYRQMNIVKKTEIQKGEFSNQNPKPRGDSSKLIPKKTNLNPIKYGGFEGSNMAYAIIIEHEKRKKKVTIEKKLIQINIMERKAFEKDEKVFLEGKGYHQPKVLTKLPKYALYECENGRRRMLGSANEVHKGNQMLLPNHLMTLLYHAEKREAIDGESLAYIEAHKAVFGELLAHISEFARKYTLANDKLDEINMLYERNKDGDVKSIAESFVSLKKFNAFGVHKDFNFFGTTIKRKRDRKLKELLNSTIIYQSITGLYESRKRLDS

SEQ ID NO: 250 - protein, 1327 aa, Listeria monocytogenes; identical to SEQ ID NO: 245

SEQ ID NO: 251 - protein, 1327 aa, Listeria monocytogenes; identical to SEQ ID NO: 249

SEQ ID NO: 252 - protein, 781 aa, Listeria monocytogenes
  VARIANT 721: note = Xaa can be any naturally occurring amino acid
IFNDLFKQKRKVKKKDLELFLRNINQIESPTIEGLEDSFNASYATYHDLLKVGMKQEILDNPLNTEMLEDIVKILTVFEDKRMIKEQLQQFSDVLDGVVLKKLERRHYTGWGRLSAKLLVGIRDKQSHLTILEYLMDDGLNRNLMQLINDSNLSFKSIIEKEQVSTTDKDLQSIVADLAGSPAIKKGILQSLKIVDELVSIMGYPPQTIVVEMARENQTTVKGKNNSRPRYKSLEKAIKEFGSQILKEHPTDNQELKNNRLYLYYLQNGKDIYTGQELDIHNLSNYDIDHIVPQSFITDNSIDNLVLTSSAGNREKGDDVPPLEIVRKRKVFWEKLYQGNLMSKRKFDYLTKAERGGLTEADKARFIHRQLVETRQITKNVANILHQRFNNETDNHGNTMEQVRIVTLKSALVSQFRKQFQLYKVREVNDYHHAHDAYLNGVVANTLLKVYPQLEPEFVYGEYHQFDWFKANKATAKKQFYTNIMLFFAQKERIIDENGEILWDKKYLETIKKVLDYRQMNIVKKTEIQKGEFSKATIKPKGNSSKLIPRKENWDPMKYGGLDSPNMAYAVIIEHAKGKKKIVIEKKLIQINIMERKMFEKDEEAFLEEKGYRHPKVLTKLPKYTLYECEKGRRRMLASANEAQKGNQLVLSNHLVSLLYHAKNCEASDGKSLKYTEAHRETFSELLAQVSEFATRYTLADANLSKINNLFEQNKEGDIKXIAQSFVDLMVFNAMGAPASFKFFEATIDRKRYTNLKELLSSTIIYQSITGLYESRKRLDD

SEQ ID NO: 253 - protein, 1327 aa, Listeria seeligeri
MKKPYTIGLDIGTNSVGWAALTDQYDLVKRKMKVAGNSEKKQIKKNLWGVRLVDEGKTAAHRRVNRTTRRRIERRRNRISYLQEIFTAEMFEVDANFFYRLEDSFYIESEKRQSRHPFFATIEEEVAYHENYRTIYHLREKLVNSSDKADLRLVYLALAHIIKYRGNFLIEGKLDTKNTSVDEVFKQFIKTYNQVFASDIERIEENNEVAKIFSEKLTKREKLDKILNLYPNEKSTDLFAQFISLIIGSKGNFKKFFNLTEKTDIECAKDSYEEDLEVLLARVGDEYAEIFVAAKNAYNAVVLSSIITVSNTETKAKLSASMIERFDKHDKDLKRMKAFFKVRLPENFNEVFNDVEKDGYAGYIEGTKQEAFYKYMKKMLEHVEGADYFINQIEEENFLRKQRTFDNGAIPHQLHLEELEAILHQQAKYYPFLKVDYEKIKSLVTFRIPYFVGPLANGQSEFSWLTRKADGEIRPWNIEEKVDFGKSAIDFIEKMTNKDTYLPKENVLPKHSMCYQKYMVYNELTKIRYTDDQGKTHYFSGQEKQQIFNDLFKQKRKVKKKDLELFLYNMNHVESPTVEGVEDAFNSSFTTYHDLQKVGVPQEILDDPLNTEMLEEIIKILTVFEDKRMINERLQEFSNVLDEAVLKKLERRHYTGWGRLSAKLLIGIRDKESHLTILDYLMDDKHNRNLMQLINDSNLSFKSIIEKEQVSTADKDIQSIVADLAGSPAIKKGILQSLKIVDELVGIMGYPPQTIVVEMARENQTTGKGKNNSKPRFTSLEKAIKELGSQILKEHPTDNQGLKNDRLYLYYLQNGKDMYTGQELDIHNLSNYDIDHVVPQSFITDNSIDNRVLASSAANREKGDNVPSLEVVRKRKVYWEKLYQAKLMSKRKFDYLTKAERGGLTEADKARFIHRQLVETRQITKNVANILHQRFNCKKDESGNVIEQVRIVTLKAALVSQFRKQFQLYKVREVNDYHHAHDAYLNCVVANTLLKVYPQLEPEFVYGDYHQFDWFKANKATAKKQFYTNIMLFFAKKDRIIDENGEILWDKKYLDTIKKVLNYRQMNIVKKTEIQKGEFSNATANPKGNSSKLIPRKADWDPIKYGGFDGSNMAYAIVIEHEKRKKKTVIKKELIQINIMERTAFEKDQKEFLEGKGYRNPKVITKIPKYTLYECENGRRRMLGSANEAQKGNQMVLPNHLMTLLYHAKNCEASDGKSLAYIESHREMFAELLDSISEFASRYTLADANLEKINTIFEQNKSGDVKVIAQSFVNLLEFNAMGAPASFKYFETNIERKRYNNLKELLNATIIYQSITGLYEARKRLDD

SEQ ID NO: 254 - protein, 1359 aa, synthetic construct; identical to SEQ ID NO: 228
  REGION 1..1359: note = Synthetic Polypeptide

SEQ ID NO: 255 - protein, 1290 aa, Roseburia hominis
IVDYCIGLDLGTGSVGWAVVDMNHRLMKRNGKHLWGSRLFSNAETAATRRSSRSIRRRYNKRRERIRLLRAILQDMVLEKDPTFFIRLEHTSFLDEEDKAKYLGDNYNLFIDEDFNDYTYYHKYPTIYHLRKALCESTEKADPRLIYLALHHIVKYRGNFLYEGQKFNMDASNIEDKLSDVFTQFADFNNIPYEDDKKNLEILEILKKPLSKKAKVDEVMALISPEKEFKSAYKELVTGIAGNKMNVTKMILCESIKQGDSEIKLKFSDSNYDDQFSEVENDLGEYVEFIDSLHNIYSWVELQTIMGATHTDNASISEAMVSRYNKHHEDLQLLKKCIKDNVPKKYFDMFRNDSEKVKGYYNYINRKAPVDEFYKFVKKCIEKVDTPEAKQILHDIELENFLLKQNSRTNGSVPYQMQLDEMIKIIDNQAKYYPVLKEKREQLLSILTFRIPYYFGPLETSEHAWIKRLEGKENQRILPWNYQDTVDVDATAEGFIKRMRSYCTYFPDEEVLPKNSLIVSKYEVYNELNKIRVDDKLLEVDVKNDIYNELFMKNKTVTEKKLKNWLVNNQCCRKDAEIKGFQKENQFSTSLTPWIDFTNIFGKIDQSNFDLIEKIIYDLTVFEDKKIMKRRLKKKYALPDDKIKQILKLKYKDWSRLSKKLLDGIVADSVTVLDVLESRLNLMEIINDKELGYAQMIEEASSCPKDGKFTYEEVAKLAGSPALKRGIWQSLQIVEEITKVMKCRPKYIYIEFERSEEKERTESKIKKLENVYKDEQTSVLEELKGFDNTKKISSDSLFLYFTQLGKCMYSGKKLDIDSLDKYQIDHIVPQSLVKDDSFDNRVLVLPSENQRKLDDLVVPFDIRDKMYRFWKLLFDHELISPKKFYSLIKTEYTERDEERFINRQLVETRQITKNVTQIIEDHYSTTKVAAIRANLSHEFRVKNHIYKNRDINDYHHAHDAYIVALIGGFMRDRYPNMHDSKAVYSEYMKMFRNKNDQKGFVINSMNYPYEVDGKLIWNPDLINEIKKCFYYKDCYCTTKLDQKSGQMFNTVLPNDAHSAKGAVIPVNKNRKDVNKYGGFSGLQYVIAAIEGTKKKGKKLVKVRKLSGIPLYLKQADIKEQIEYVEKEEKLSDVKIIKNNIPLNQLIEIDGRQYLLTSECVNAMQLVLNEEQCKLIADIYNAIYKQDFDGLDNMLMIQLYLQLIDKLKTLYPIYMGIVEKFEKFVSISKEEKANVIQMLIIMHKGPQNGNIIYDDFNVGKRIGRLNGRTFYLNIEFISQSPTGIYTKKYKL

SEQ ID NO: 256 - protein, 1292 aa, Sharpea azabuensis
KDIRYSIGLDIGTNSVGWAVMDEHYELLKKGNHHMWGSRLFDAAEPAATRRASRSIRRRYNKRRERIRLLRDLLGDMVMEVDPTFFIRLLNVSFLDEEDKQKNLGDNYNLFIEKDFNDKTYYDKYPTIYHLRKELCENKEKADPRLIYLALHHIVKYRGNFLYEGQSFTMDNSDIEERLNSAIEKFMSINEFDNRIVSDINSMIAVLSKIYQRSKKADDLLKIMNPTKEEKAAYKEFTKALVGLKFNISKMILAQEVKKGDTDIVLEFSNANYDSTIDELQSELGEYIEFIEMLHNIYSWVELQAILGATHTDNPSISAAMVERYEEHKKDLRVLKKVIREELPDKYNEVFRKDNRKLHNYLGYIKYDTPVEEFYKYIKGLLAKVDTDEAREILERIDLEKFMLKQNSRTNGSIPYQMQKDEMIQIIDNQSVYYPQLKENRDKLISILEFRIPYYFGPLAHSEFAWIKKFEDKQKERILPWNYDQIVDIDATAEGFIERMKNTGTYFPDEPVMAKNSLTVSKFEVLNELNKIRINGKLIAVETKKELLSDLFMKNKTITDKKLKDWLVTHQYYDINEELKIEGYQKDLQFSTSLAPWIDFTKIFGEINASNYQLIEKIIYDISIFEDKKILKRRLKKVYQLDDLLVDKILKLNYTGWSRLSEKLLTGMTADKATVLFVLESNKNLMEIINDEKLGYKQIIEESNMQDIEGPFKYDEVKKLAGSPAIKRGIWQALLVVREITKFMKHEPSHIYIEFAREEQKVRKESKIAKLQKIYENLQTQVYESLKKEDAKKRMETDALYLYYLQMGKSMYSGKPLDIDKLSTYQIDHILPQSLIKDDSFDNRVLVLPEENQWKLDSETVPFEIRNKMIGFWQMLHENGLMSNKKFFSLIRTDFSDKDKERFINRQLVETRQIIKNVAVIINDHYTNTNIVTVRAELSHQFRERYKIYKNRDINDFHHAHDAYIACIVGQFMHQNFEHLDAKIIYGQYKKNYKKNYGFILNSMNHLQSDIDTGEVMWDPAKIGKIKSCFYYKDVYVTKKLEQNSGTLFNTVLPNDAHSEKGATVPLNKYRADVHKYGGFGNVQSIIVAIEGKKKKGKKLIDVRKLTSIPLHLKNAPVEEQLSYIASPEHEDLIDVRIVKEILKNQLIEIDGGLYYVTSEYVTARQLSLNEQSCKLISEIYAAMLKKRYEYLDEEEIFDLYLQLLQKMDTLYPAYKGIAKRFFDFKNIDVVEKCDVIQILIIMHAGPMNGNIMYDDFKFTNRIGRFTHKNIDLKTTFISTSVTGLFSKKYKL

SEQ ID NO: 257 - protein, 1359 aa, synthetic construct; identical to SEQ ID NO: 228
  REGION 1..1359: note = Synthetic Polypeptide

SEQ ID NO: 258 - protein, 1359 aa, synthetic construct
  REGION 1..1359: note = Synthetic Polypeptide
MDKKYSIGLAIGTNSVGWAVITDEYKVPSKKFKVLGNTDRHSIKKNLIGALLFDSGETAEATRLKRTARRRYTRRKNRICYLQEIFSNEMAKVDDSFFHRLEESFLVEEDKKHERHPIFGNIVDEVAYHEKYPTIYHLRKKLVDSTDKADLRLIYLALAHMIKFRGHFLIEGDLNPDNSDVDKLFIQLVQTYNQLFEENINASGVDAKAILSARLSKSRRLENLIAQLPGEKKNGLFGNLIALSLGLTPNFKSNFDLAEDAKLQLSKDTYDDDLDNLLAQIGDQYADLFLAAKNLSDAILLSDILRVNTEITKAPLSASMIKRYDEHHQDLTLLKALVRQQLPEKYKEIFFDQSKNGYAGYIDGGASQEEFYKFIKPILEKMDGTEELLVKLNREDLLRKQRTFDNGSIPHQIHLGELHAILRRQEDFYPFLKDNREKIEKILTFRIPYYVGPLARGNSRFAWMTRKSEETITPWNFEEVVDKGASAQSFIERMTNFDKNLPNEKVLPKHSLLYEYFTVYNELTKVKYVTEGMRKPAFLSGEQKKAIVDLLFKTNRKVTVKQLKEDYFKKIECFDSVEISGVEDRFNASLGTYHDLLKIIKDKDFLDNEENEDILEDIVLTLTLFEDREMIEERLKTYAHLFDDKVMKQLKRRRYTGWGRLSRKLINGIRDKQSGKTILDFLKDGFANRNFMQLIHDDSLTFKEDIQKAQVSGQGDSLHEHIANLAGSPAIKKGILQTVKVVDELVKVMGRHKPENIVIEMARENQTTQKGQKNSRERMKRIEEGIKELGSQILKEHPVENTQLQNEKLYLYYLQNGRDMYVDQELDINRLSDYDVDAIVPQSFLKDDSIDNKVLTRSDKNRGKSDNVPSEEVVKKMKNYWRQLLNAKLITQRKFDNLTKAERGGLSELDKAGFIKRQLVETRQITKHVAQILDSRMNTKYDENDKLIREVKVITLKSKLVSDFRKDFQFYKVREINNYHHAHDAYLNAVVGTALIKKYPKLESEFVYGDYKVYDVSEQEIGKATAKYFFYSNIMNFFKTEITLANGEIRKRPLIETNGETGEIVWDKGRDFATVRKVLSMPQVNIVKKTEVQTGGFSKESILPKRNSDKLIARKKDWDPKKYGGFDSPTVAYSVLVVAKVEKGKSKKLKSVKELLGITIMERSSFEKNPIDFLEAKGYKEVKKDLIIKLPKYSLFELENGRKRMLASGELQKGNELALPSKYVNFLYLASHYEKLKGSPEDNEQKQLFVEQHKHYLDEIIEQISEFSKRVILADANLDKVLSAYNKHRDKPIREQAENIIHLFTLTNLGAPAAFKYFDTTIDRKRYTSTKEVLDATLIHQSITGLYETRIDLSQLGGD

SEQ ID NO: 259 - protein, 1359 aa, synthetic construct; identical to SEQ ID NO: 11
  REGION 1..1359: note = Synthetic Polypeptide

SEQ ID NO: 260 - protein, 1359 aa, synthetic construct; identical to SEQ ID NO: 258
  REGION 1..1359: note = Synthetic Polypeptide

SEQ ID NO: 261-262 - skipped (2 entries)

SEQ ID NO: 263 - protein, 1368 aa, synthetic construct; identical to SEQ ID NO: 9
  REGION 1..1368: note = Synthetic Polypeptide

SEQ ID NO: 264 - DNA, 20 bp, synthetic construct
  misc_feature 1..20: note = Synthetic Polynucleotide
  source 1..20: mol_type = other DNA
ttatttcgtggatttattta

SEQ ID NO: 265 - protein, 4 aa, synthetic construct
  REGION 1..4: note = Synthetic Polypeptide
GGGS

SEQ ID NO: 266 - protein, 198 aa, Homo sapiens [sequence omitted]

SEQ ID NO: 267 - protein, 198 aa, Mus musculus
MDSLLMKQKKFLYHFKNVRWAKGRHETYLCYVVKRRDSATSCSLDFGHLRNKSGCHVELLFLRYISDWDLDPGRCYRVTWFTSWSPCYDCARHVAEFLRWNPNLSLRIFTARLYFCEDRKAEPEGLRRLHRAGVQIGIMTFKDYFYCWNTFVENRERTFKAWEGLHENSVRLTRQLRRILLPLYEVDDLRDAFRMLGF

SEQ ID NO: 268 - protein, 198 aa, Canis lupus
MDSLLMKQRKFLYHFKNVRWAKGRHETYLCYVVKRRDSATSFSLDFGHLRNKSGCHVELLFLRYISDWDLDPGRCYRVTWFTSWSPCYDCARHVADFLRGYPNLSLRIFAARLYFCEDRKAEPEGLRRLHRAGVQIAIMTFKDYFYCWNTFVENREKTFKAWEGLHENSVRLSRQLRRILLPLYEVDDLRDAFRTLGL

SEQ ID NO: 269 - protein, 199 aa, Bos taurus
MDSLLKKQRQFLYQFKNVRWAKGRHETYLCYVVKRRDSPTSFSLDFGHLRNKAGCHVELLFLRYISDWDLDPGRCYRVTWFTSWSPCYDCARHVADFLRGYPNLSLRIFTARLYFCDKERKAEPEGLRRLHRAGVQIAIMTFKDYFYCWNTFVENHERTFKAWEGLHENSVRLSRQLRRILLPLYEVDDLRDAFRTLGL

SEQ ID NO: 270 - protein, 429 aa, Mus musculus
MGPFCLGCSHRKCYSPIRNLISQETFKFHFKNLGYAKGRKDTFLCYEVTRKDCDSPVSLHHGVFKNKDNIHAEICFLYWFHDKVLKVLSPREEFKITWYMSWSPCFECAEQIVRFLATHHNLSLDIFSSRLYNVQDPETQQNLCRLVQEGAQVAAMDLYEFKKCWKKFVDNGGRRFRPWKRLLTNFRYQDSKLQEILRPCYIPVPSSSSSTLSNICLTKGLPETRFCVEGRRMDPLSEEEFYSQFYNQRVKHLCYYHRMKPYLCYQLEQFNGQAPLKGCLLSEKGKQHAEILFLDKIRSMELSQVTITCYLTWSPCPNCAWQLAAFKRDRPDLILHIYTSRLYFHWKRPFQKGLCSLWQSGILVDVMDLPQFTDCWTNFVNPKRPFWPWKGLEIISRRTQRRLRRIKESWGLQDLVNDFGNLQLGPPMS

SEQ ID NO: 271 - protein, 429 aa, Rattus rattus
MGPFCLGCSHRKCYSPIRNLISQETFKFHFKNLRYAIDRKDTFLCYEVTRKDCDSPVSLHHGVFKNKDNIHAEICFLYWFHDKVLKVLSPREEFKITWYMSWSPCFECAEQVLRFLATHHNLSLDIFSSRLYNIRDPENQQNLCRLVQEGAQVAAMDLYEFKKCWKKFVDNGGRRFRPWKKLLTNFRYQDSKLQEILRPCYIPVPSSSSSTLSNICLTKGLPETRFCVERRRVHLLSEEEFYSQFYNQRVKHLCYYHGVKPYLCYQLEQFNGQAPLKGCLLSEKGKQHAEILFLDKIRSMELSQVIITCYLTWSPCPNCAWQLAAFKRDRPDLILHIYTSRLYFHWKRPFQKGLCSLWQSGILVDVMDLPQFTDCWTNFVNPKRPFWPWKGLEIISRRTQRRLHRIKESWGLQDLVNDFGNLQLGPPMS

SEQ ID NO: 272 - protein, 370 aa, Macaca mulatta
MVEPMDPRTFVSNFNNRPILSGLNTVWLCCEVKTKDPSGPPLDAKIFQGKVYSKAKYHPEMRFLRWFHKWRQLHHDQEYKVTWYVSWSPCTRCANSVATFLAKDPKVTLTIFVARLYYFWKPDYQQALRILCQKRGGPHATMKIMNYNEFQDCWNKFVDGRGKPFKPRNNLPKHYTLLQATLGELLRHLMDPGTFTSNFNNKPWVSGQHETYLCYKVERLHNDTWVPLNQHRGFLRNQAPNIHGFPKGRHAELCFLDLIPFWKLDGQQYRVTCFTSWSPCFSCAQEMAKFISNNEHVSLCIFAARIYDDQGRYQEGLRALHRDGAKIAMMNYSEFEYCWDTFVDRQGRPFQPWDGLDEHSQALSGRLRAI

SEQ ID NO: 273 - protein, 384 aa, Pan troglodytes
MKPHFRNPVERMYQDTFSDNFYNRPILSHRNTVWLCYEVKTKGPSRPPLDAKIFRGQVYSKLKYHPEMRFFHWFSKWRKLHRDQEYEVTWYISWSPCTKCTRDVATFLAEDPKVTLTIFVARLYYFWDPDYQEALRSLCQKRDGPRATMKIMNYDEFQHCWSKFVYSQRELFEPWNNLPKYYILLHIMLGEILRHSMDPPTFTSNFNNELWVRGRHETYLCYEVERLHNDTWVLLNQRRGFLCNQAPHKHGFLEGRHAELCFLDVIPFWKLDLHQDYRVTCFTSWSPCFSCAQEMAKFISNNKHVSLCIFAARIYDDQGRCQEGLRTLAKAGAKISIMTYSEFKHCWDTFVDHQGCPFQPWDGLEEHSQALSGRLRAILQNQGN

SEQ ID NO: 274 - protein, 377 aa, Chlorocebus sabaeus
MNPQIRNMVEQMEPDIFVYYFNNRPILSGRNTVWLCYEVKTKDPSGPPLDANIFQGKLYPEAKDHPEMKFLHWFRKWRQLHRDQEYEVTWYVSWSPCTRCANSVATFLAEDPKVTLTIFVARLYYFWKPDYQQALRILCQERGGPHATMKIMNYNEFQHCWNEFVDGQGKPFKPRKNLPKHYTLLHATLGELLRHVMDPGTFTSNFNNKPWVSGQRETYLCYKVERSHNDTWVLLNQHRGFLRNQAPDRHGFPKGRHAELCFLDLIPFWKLDDQQYRVTCFTSWSPCFSCAQKMAKFISNNKHVSLCIFAARIYDDQGRCQEGLRTLHRDGAKIAVMNYSEFEYCWDTFVDRQGRPFQPWDGLDEHSQALSGRLRAI

SEQ ID NO: 275 - protein, 384 aa, Homo sapiens
MKPHFRNTVERMYRDTFSYNFYNRPILSRRNTVWLCYEVKTKGPSRPPLDAKIFRGQVYSELKYHPEMRFFHWFSKWRKLHRDQEYEVTWYISWSPCTKCTRDMATFLAEDPKVTLTIFVARLYYFWDPDYQEALRSLCQKRDGPRATMKIMNYDEFQHCWSKFVYSQRELFEPWNNLPKYYILLHIMLGEILRHSMDPPTFTFNFNNEPWVRGRHETYLCYEVERMHNDTWVLLNQRRGFLCNQAPHKHGFLEGRHAELCFLDVIPFWKLDLDQDYRVTCFTSWSPCFSCAQEMAKFISKNKHVSLCIFTARIYDDQGRCQEGLRTLAEAGAKISIMTYSEFKHCWDTFVDHQGCPFQPWDGLDEHSQDLSGRLRAILQNQEN

SEQ ID NO: 276 - protein, 373 aa, Homo sapiens
MKPHFRNTVERMYRDTFSYNFYNRPILSRRNTVWLCYEVKTKGPSRPRLDAKIFRGQVYSQPEHHAEMCFLSWFCGNQLPAYKCFQITWFVSWTPCPDCVAKLAEFLAEHPNVTLTISAARLYYYWERDYRRALCRLSQAGARVKIMDDEEFAYCWENFVYSEGQPFMPWYKFDDNYAFLHRTLKEILRNPMEAMYPHIFYFHFKNLRKAYGRNESWLCFTMEVVKHHSPVSWKRGVFRNQVDPETHCHAERCFLSWFCDDILSPNTNYEVTWYTSWSPCPECAGEVAEFLARHSNVNLTIFTARLYYFWDTDYQEGLRSLSQEGASVEIMGYKDFKYCWENFVYNDDEPFKPWKGLKYNFLFLDSKLQEILE

SEQ ID NO: 277 - protein, 382 aa, Homo sapiens
MNPQIRNPMERMYRDTFYDNFENEPILYGRSYTWLCYEVKIKRGRSNLLWDTGVFRGQVYFKPQYHAEMCFLSWFCGNQLPAYKCFQITWFVSWTPCPDCVAKLAEFLSEHPNVTLTISAARLYYYWERDYRRALCRLSQAGARVTIMDYEEFAYCWENFVYNEGQQFMPWYKFDENYAFLHRTLKEILRYLMDPDTFTFNFNNDPLVLRRRQTYLCYEVERLDNGTWVLMDQHMGFLCNEAKNLLCGFYGRHAELRFLDLVPSLQLDPAQIYRVTWFISWSPCFSWGCAGEVRAFLQENTHVRLRIFAARIYDYDPLYKEALQMLRDAGAQVSIMTYDEFEYCWDTFVYRQGCPFQPWDGLEEHSQALSGRLRAILQNQGN

SEQ ID NO: 278 - protein, 190 aa, Homo sapiens
MNPQIRNPMKAMYPGTFYFQFKNLWEANDRNETWLCFTVEGIKRRSVVSWKTGVFRNQVDSETHCHAERCFLSWFCDDILSPNTKYQVTWYTSWSPCPDCAGEVAEFLARHSNVNLTIFTARLYYFQYPCYQEGLRSLSQEGVAVEIMDYEDFKYCWENFVYNDNEPFKPWKGLKTNFRLLKRRLRESLQ

SEQ ID NO: 279 - protein, 199 aa, Homo sapiens
MEASPASGPRHLMDPHIFTSNFNNGIGRHKTYLCYEVERLDNGTSVKMDQHRGFLHNQAKNLLCGFYGRHAELRFLDLVPSLQLDPAQIYRVTWFISWSPCFSWGCAGEVRAFLQENTHVRLRIFAARIYDYDPLYKEALQMLRDAGAQVSIMTYDEFKHCWDTFVDHQGCPFQPWDGLDEHSQALSGRLRAILQNQGN

SEQ ID NO: 280 - protein, 200 aa, Homo sapiens
MALLTAETFRLQFNNKRRLRRPYYPRKALLCYQLTPQNGSTPTRGYFENKKKCHAEICFINEIKSMGLDETQCYQVTCYLTWSPCSSCAWELVDFIKAHDHLNLGIFASRLYYHWCKPQQKGLRLLCGSQVPVEVMGFPKFADCWENFVDHEKPLSFNPYKMLEELDKNSRAIKRRLERIKIPGVRAQGRYMDILCDAEV

SEQ ID NO: 281 - protein, 386 aa, Homo sapiens
MNPQIRNPMERMYRDTFYDNFENEPILYGRSYTWLCYEVKIKRGRSNLLWDTGVFRGPVLPKRQSNHRQEVYFRFENHAEMCFLSWFCGNRLPANRRFQITWFVSWNPCLPCVVKVTKFLAEHPNVTLTISAARLYYYRDRDWRWVLLRLHKAGARVKIMDYEDFAYCWENFVCNEGQPFMPWYKFDDNYASLHRTLKEILRNPMEAMYPHIFYFHFKNLLKACGRNESWLCFTMEVTKHHSAVFRKRGVFRNQVDPETHCHAERCFLSWFCDDILSPNTNYEVTWYTSWSPCPECAGEVAEFLARHSNVNLTIFTARLCYFWDTDYQEGLCSLSQEGASVKIMGYKDFVSCWKNFVYSDDEPFKPWKGLQTNFRLLKRRLREILQ

SEQ ID NO: 282 - protein, 236 aa, Homo sapiens
MTSEKGPSTGDPTLRRRIEPWEFDVFYDPRELRKEACLLYEIKWGMSRKIWRSSGKNTTNHVEVNFIKKFTSERDFHPSMSCSITWFLSWSPCWECSQAIREFLSRHPGVTLVIYVARLFWHMDQQNRQGLRDLVNSGVTIQIMRASEYYHCWRNFVNYPPGDEAHWPQYPPLWMMLYALELHCIILSLPPCLKISRRWQNHLTFFRLHLQNCHYQTIPPHILLATGLIHPSVAWR

SEQ ID NO: 283 - protein, 229 aa, Mus musculus
MSSETGPVAVDPTLRRRIEPHEFEVFFDPRELRKETCLLYEINWGGRHSVWRHTSQNTSNHVEVNFLEKFTTERYFRPNTRCSITWFLSWSPCGECSRAITEFLSRHPYVTLFIYIARLYHHTDQRNRQGLRDLISSGVTIQIMTEQEYCYCWRNFVNYPPSNEAYWPRYPHLWVKLYVLELYCIILGLPPCLKILRRKQPQLTFFTITLQTCHYQRIPPHLLWATGLK

SEQ ID NO: 284 - protein, 229 aa, Rattus rattus [sequence omitted]

SEQ ID NO: 285 - protein, 1612 aa, synthetic construct
  REGION 1..1612: note = Synthetic Polypeptide
MSSETGPVAVDPTLRRRIEPHEFEVFFDPRELRKETCLLYEINWGGRHSIWRHTSQNTNKHVEVNFIEKFTTERYFCPNTRCSITWFLSWSPCGECSRAITEFLSRYPHVTLFIYIARLYHHADPRNRQGLRDLISSGVTIQIMTEQESGYCWRNFVNYSPSNEAHWPRYPHLWVRLYVLELYCIILGLPPCLNILRRKQPQLTFFTIALQSCHYQRLPPHILWATGLKSGSETPGTSESATPESDKKYSIGLAIGTNSVGWAVITDEYKVPSKKFKVLGNTDRHSIKKNLIGALLFDSGETAEATRLKRTARRRYTRRKNRICYLQEIFSNEMAKVDDSFFHRLEESFLVEEDKKHERHPIFGNIVDEVAYHEKYPTIYHLRKKLVDSTDKADLRLIYLALAHMIKFRGHFLIEGDLNPDNSDVDKLFIQLVQTYNQLFEENPINASGVDAKAILSARLSKSRRLENLIAQLPGEKKNGLFGNLIALSLGLTPNFKSNFDLAEDAKLQLSKDTYDDDLDNLLAQIGDQYADLFLAAKNLSDAILLSDILRVNTEITKAPLSASMIKRYDEHHQDLTLLKALVRQQLPEKYKEIFFDQSKNGYAGYIDGGASQEEFYKFIKPILEKMDGTEELLVKLNREDLLRKQRTFDNGSIPHQIHLGELHAILRRQEDFYPFLKDNREKIEKILTFRIPYYVGPLARGNSRFAWMTRKSEETITPWNFEEVVDKGASAQSFIERMTAFDKNLPNEKVLPKHSLLYEYFTVYNELTKVKYVTEGMRKPAFLSGEQKKAIVDLLFKTNRKVTVKQLKEDYFKKIECFDSVEISGVEDRFNASLGTYHDLLKIIKDKDFLDNEENEDILEDIVLTLTLFEDREMIEERLKTYAHLFDDKVMKQLKRRRYTGWGALSRKLINGIRDKQSGKTILDFLKSDGFANRNFMALIHDDSLTFKEDIQKAQVSGQGDSLHEHIANLAGSPAIKKGILQTVKVVDELVKVMGRHKPENIVIEMARENQTTQKGQKNSRERMKRIEEGIKELGSQILKEHPVENTQLQNEKLYLYYLQNGRDMYVDQELDINRLSDYDVDHIVPQSFLKDDSIDNKVLTRSDKNRGKSDNVPSEEVVKKMKNYWRQLLNAKLITQRKFDNLTKAERGGLSELDKAGFIKRQLVETRAITKHVAQILDSRMNTKYDENDKLIREVKVITLKSKLVSDFRKDFQFYKVREINNYHHAHDAYLNAVVGTALIKKYPKLESEFVYGDYKVYDVRKMIAKSEQEIGKATAKYFFYSNIMNFFKTEITLANGEIRKRPLIETNGETGEIVWDKGRDFATVRKVLSMPQVNIVKKTEVQTGGFSKESILPKRNSDKLIARKKDWDPKKYGGFDSPTVAYSVLVVAKVEKGKSKKLKSVKELLGITIMERSSFEKNPIDFLEAKGYKEVKKDLIIKLPKYSLFELENGRKRMLASAGELQKGNELALPSKYVNFLYLASHYEKLKGSPEDNEQKQLFVEQHKHYLDEIIEQISEFSKRVILADANLDKVLSAYNKHRDKPIREQAENIIHLFTLTNLGAPAAFKYFDTTIDRKRYTSTKEVLDATLIHQSITGLYETRIDLSQLGGD

SEQ ID NO: 286-292 - skipped (7 entries)

SEQ ID NO: 293 - DNA, 23 bp, synthetic construct
  misc_feature 1..23: note = Synthetic Polynucleotide
  source 1..23: mol_type = other DNA
gagtccgagcagaagaagaaggg

SEQ ID NO: 294 - DNA, 23 bp, synthetic construct
  misc_feature 1..23: note = Synthetic Polynucleotide
  source 1..23: mol_type = other DNA
ggaatcccttctgcagcacctgg

SEQ ID NO: 295 - DNA, 23 bp, synthetic construct
  misc_feature 1..23: note = Synthetic Polynucleotide
  source 1..23: mol_type = other DNA
gaacacaaagcatagactgcggg

SEQ ID NO: 296 - DNA, 23 bp, synthetic construct
  misc_feature 1..23: note = Synthetic Polynucleotide
  source 1..23: mol_type = other DNA
ggcccagactgagcacgtgatgg

SEQ ID NO: 297 - DNA, 23 bp, synthetic construct
  misc_feature 1..23: note = Synthetic Polynucleotide
  source 1..23: mol_type = other DNA
ggcactgcggctggaggtggggg

SEQ ID NO: 298 - DNA, 23 bp, synthetic construct
  misc_feature 1..23: note = Synthetic Polynucleotide
  source 1..23: mol_type = other DNA
gtcatcttagtcattacctgagg

SEQ ID NO: 299 - protein, 7 aa, synthetic construct
  REGION 1..7: note = Synthetic Polypeptide
  VARIANT 2: note = X is Arginine or Cysteine
KXLAVYQ

SEQ ID NO: 300 - protein, 7 aa, synthetic construct
  REGION 1..7: note = Synthetic Polypeptide
  VARIANT 7: note = X is Asparagine or Aspartic acid
HYNYMCX

SEQ ID NO: 301 - protein, 7 aa, synthetic construct
  REGION 1..7: note = Synthetic Polypeptide
  VARIANT 6: note = X is Cysteine or Tyrosine
RAMAIXK

SEQ ID NO: 302 - skipped

SEQ ID NO: 303 - DNA, 23 bp, synthetic construct
  misc_feature 1..23: note = Synthetic Polynucleotide
  source 1..23: mol_type = other DNA
ggaatcccttctgcagcacctgg

SEQ ID NO: 304 - DNA, 20 bp, synthetic construct
  misc_feature 1..20: note = Synthetic Polynucleotide
  source 1..20: mol_type = other DNA
ctcccatcacatcaaccggt

SEQ ID NO: 305 - DNA, 26 bp, synthetic construct
  misc_feature 1..26: note = Synthetic Polynucleotide
  source 1..26: mol_type = other DNA
tttcctcccccccacaggtagaacat

SEQ ID NO: 306 - DNA, 27 bp, synthetic construct
  misc_feature 1..27: note = Synthetic Polynucleotide
  source 1..27: mol_type = other DNA
tttccctctgtccacaccctcatcctg

SEQ ID NO: 307 - DNA, 27 bp, synthetic construct
  misc_feature 1..27: note = Synthetic Polynucleotide
  source 1..27: mol_type = other DNA
tttccccagtcctccacaccctgaaac

SEQ ID NO: 308 - DNA, 20 bp, synthetic construct
  misc_feature 1..20: note = Synthetic Polynucleotide
  source 1..20: mol_type = other DNA
tgcccctccctccctggccc

SEQ ID NO: 309 - DNA, 20 bp, synthetic construct
  misc_feature 1..20: note = Synthetic Polynucleotide
  source 1..20: mol_type = other DNA
agagccccccctcaaagaga

SEQ ID NO: 310 - DNA, 23 bp, synthetic construct
  misc_feature 1..23: note = Synthetic Polynucleotide
  source 1..23: mol_type = other DNA
ggcccagactgagcacgtgatgg

SEQ ID NO: 311 - DNA, 23 bp, synthetic construct
  misc_feature 1..23: note = Synthetic Polynucleotide
  source 1..23: mol_type = other DNA
gagtccgagcagaagaagaaggg

SEQ ID NO: 312 - DNA, 23 bp, synthetic construct
  misc_feature 1..23: note = Synthetic Polynucleotide
  source 1..23: mol_type = other DNA
gaacacaaagcatagactgcggg

SEQ ID NO: 313 - DNA, 21 bp, synthetic construct
  misc_feature 1..21: note = Synthetic Polynucleotide
  source 1..21: mol_type = other DNA
gagtccgagcagaagaagaag

SEQ ID NO: 314 - DNA, 23 bp, synthetic construct
  misc_feature 1..23: note = Synthetic Polynucleotide
  source 1..23: mol_type = other DNA
ggaatcccttctgcagcacctgg

SEQ ID NO: 315 - DNA, 20 bp, synthetic construct
  misc_feature 1..20: note = Synthetic Polynucleotide
  source 1..20: mol_type = other DNA
ggcccagactgagcacgtga

SEQ ID NO: 316 - DNA, 23 bp, synthetic construct
  misc_feature 1..23: note = Synthetic Polynucleotide
  source 1..23: mol_type = other DNA
ggcactgcggctggaggtggggg

SEQ ID NO: 317 - DNA, 20 bp, synthetic construct
  misc_feature 1..20: note = Synthetic Polynucleotide
  source 1..20: mol_type = other DNA
gtcaggtcgagggttctgtc

SEQ ID NO: 318 - DNA, 20 bp, synthetic construct
  misc_feature 1..20: note = Synthetic Polynucleotide
  source 1..20: mol_type = other DNA
gggccgcagtatcctcactc

SEQ ID NO: 319 - DNA, 20 bp, synthetic construct
  misc_feature 1..20: note = Synthetic Polynucleotide
  source 1..20: mol_type = other DNA
ccgccagtcccagtacggga

SEQ ID NO: 320 - DNA, 20 bp, synthetic construct
  misc_feature 1..20: note = Synthetic Polynucleotide
  source 1..20: mol_type = other DNA
caaccactgctcaaagatgc

SEQ ID NO: 321 - DNA, 20 bp, synthetic construct
  misc_feature 1..20: note = Synthetic Polynucleotide
  source 1..20: mol_type = other DNA
cttccaggatgagaacacag

SEQ ID NO: 322 - protein, 181 aa, Erwinia tasmaniensis
MASRGVNKVILVGNLGQDPEVRYMPNGGAVANITLATSESWRDKQTGETKEKTEWHRVVLFGKLAEVAGEYLRKGSQVYIEGALQTRKWTDQAGVEKYTTEVVVNVGGTMQMLGGRSQGGGASAGGQNGGSNNGWGQPQQPQGGNQFSGGAQQQARPQQQPQQNNAPANNEPPIDFDDDIP

SEQ ID NO: 323 - protein, 209 aa, synthetic construct
  REGION 1..209: note = Synthetic Polypeptide
MAGAQDFVPHTADLAELAAAAGECRGCGLYRDATQAVFGAGGRSARIMMIGEQPGDKEDLAGLPFVGPAGRLLDRALEAADIDRDALYVTNAVKHFKFTRAAGGKRRIHKTPSRTEVVACRPWLIAEMTSVEPDVVVLLGATAAKALLGNDFRVTQHRGEVLHVDDVPGDPALVATVHPSSLLRGPKEERESAFAGLVDDLRVAADVRP

SEQ ID NO: 324 - protein, 313 aa, synthetic construct
  REGION 1..313: note = Synthetic Polypeptide
MIGQKTLYSFFSPSPARKRHAPSPEPAVQGTGVAGVPEESGDAAAIPAKKAPAGQEEPGTPPSSPLSAEQLDRIQRNKAAALLRLAARNVPVGFGESWKKHLSGEFGKPYFIKLMGFVAEERKHYTVYPPPHQVFTWTQMCDIKDVKVVILGQEPYHGPNQAHGLCFSVQRPVPPPPSLENIYKELSTDIEDFVHPGHGDLSGWAKQGVLLLNAVLTVRAHQANSHKERGWEQFTDAVVSWLNQNSNGLVFLLWGSYAQKKGSAIDRKRHHVLQTAHPSPLSVYRGFFGCRHFSKTNELLQKSGKKPIDWKEL

SEQ ID NO: 325 - protein, 1367 aa, synthetic construct
  REGION 1..1367: note = Synthetic Polypeptide
DKKYSIGLAIGTNSVGWAVITDEYKVPSKKFKVLGNTDRHSIKKNLIGALLFDSGETAEATRLKRTARRRYTRRKNRICYLQEIFSNEMAKVDDSFFHRLEESFLVEEDKKHERHPIFGNIVDEVAYHEKYPTIYHLRKKLVDSTDKADLRLIYLALAHMIKFRGHFLIEGDLNPDNSDVDKLFIQLVQTYNQLFEENPINASGVDAKAILSARLSKSRRLENLIAQLPGEKKNGLFGNLIALSLGLTPNFKSNFDLAEDAKLQLSKDTYDDDLDNLLAQIGDQYADLFLAAKNLSDAILLSDILRVNTEITKAPLSASMIKRYDEHHQDLTLLKALVRQQLPEKYKEIFFDQSKNGYAGYIDGGASQEEFYKFIKPILEKMDGTEELLVKLNREDLLRKQRTFDNGSIPHQIHLGELHAILRRQEDFYPFLKDNREKIEKILTFRIPYYVGPLARGNSRFAWMTRKSEETITPWNFEEVVDKGASAQSFIERMTAFDKNLPNEKVLPKHSLLYEYFTVYNELTKVKYVTEGMRKPAFLSGEQKKAIVDLLFKTNRKVTVKQLKEDYFKKIECFDSVEISGVEDRFNASLGTYHDLLKIIKDKDFLDNEENEDILEDIVLTLTLFEDREMIEERLKTYAHLFDDKVMKQLKRRRYTGWGALSRKLINGIRDKQSGKTILDFLKSDGFANRNFMALIHDDSLTFKEDIQKAQVSGQGDSLHEHIANLAGSPAIKKGILQTVKVVDELVKVMGRHKPENIVIEMARENQTTQKGQKNSRERMKRIEEGIKELGSQILKEHPVENTQLQNEKLYLYYLQNGRDMYVDQELDINRLSDYDVDHIVPQSFLKDDSIDNKVLTRSDKNRGKSDNVPSEEVVKKMKNYWRQLLNAKLITQRKFDNLTKAERGGLSELDKAGFIKRQLVETRAITKHVAQILDSRMNTKYDENDKLIREVKVITLKSKLVSDFRKDFQFYKVREINNYHHAHDAYLNAVVGTALIKKYPKLESEFVYGDYKVYDVRKMIAKSEQEIGKATAKYFFYSNIMNFFKTEITLANGEIRKRPLIETNGETGEIVWDKGRDFATVRKVLSMPQVNIVKKTEVQTGGFSKESILPKRNSDKLIARKKDWDPKKYGGFDSPTVAYSVLVVAKVEKGKSKKLKSVKELLGITIMERSSFEKNPIDFLEAKGYKEVKKDLIIKLPKYSLFELENGRKRMLASAGELQKGNELALPSKYVNFLYLASHYEKLKGSPEDNEQKQLFVEQHKHYLDEIIEQISEFSKRVILADANLDKVLSAYNKHRDKPIREQAENIIHLFTLTNLGAPAAFKYFDTTIDRKRYTSTKEVLDATLIHQSITGLYETRIDLSQLGGD

SEQ ID NO: 326 - skipped

SEQ ID NO: 327 - DNA, 23 bp, synthetic construct
  misc_feature 1..23: note = Synthetic Polynucleotide
  source 1..23: mol_type = other DNA
gaacacaatgcatagattgccgg

SEQ ID NO: 328 - DNA, 23 bp, synthetic construct
  misc_feature 1..23: note = Synthetic Polynucleotide
  source 1..23: mol_type = other DNA
aaacataaagcatagactgcaaa

SEQ ID NO: 329 - DNA, 22 bp, synthetic construct
  misc_feature 1..22: note = Synthetic Polynucleotide
  source 1..22: mol_type = other DNA
ggtgtttcgtcctttccacaag

SEQ ID NO: 330 - DNA, 55 bp, synthetic construct
  misc_feature 1..55: note = Synthetic Polynucleotide
  source 1..55: mol_type = other DNA
gcttgcagatggccatggcggttttagagctagaaatagcaagttaaaataaggc

SEQ ID NO: 331 - DNA, 55 bp, synthetic construct
  misc_feature 1..55: note = Synthetic Polynucleotide
  source 1..55: mol_type = other DNA
tgtcacacatgtagttgtaggttttagagctagaaatagcaagttaaaataaggc

SEQ ID NO: 332 - DNA, 55 bp, synthetic construct
  misc_feature 1..55: note = Synthetic Polynucleotide
  source 1..55: mol_type = other DNA
gaagcgcctggcagtgtaccgttttagagctagaaatagcaagttaaaataaggc

SEQ ID NO: 333 - DNA, 55 bp, synthetic construct
  misc_feature 1..55: note = Synthetic Polynucleotide
  source 1..55: mol_type = other DNA
gagtccgagcagaagaagaagttttagagctagaaatagcaagttaaaataaggc

SEQ ID NO: 334 - DNA, 55 bp, synthetic construct
  misc_feature 1..55: note = Synthetic Polynucleotide
  source 1..55: mol_type = other DNA
ggaatcccttctgcagcaccgttttagagctagaaatagcaagttaaaataaggc

SEQ ID NO: 335 - DNA, 55 bp, synthetic construct
  misc_feature 1..55: note = Synthetic Polynucleotide
  source 1..55: mol_type = other DNA
gaacacaaagcatagactgcgttttagagctagaaatagcaagttaaaataaggc

SEQ ID NO: 336 - DNA, 56 bp, synthetic construct
  misc_feature 1..56: note = Synthetic Polynucleotide
  source 1..56: mol_type = other DNA
ggcccagactgagcacgtagagttttagagctagaaatagcaagttaaaataaggc

SEQ ID NO: 337 - DNA, 55 bp, synthetic construct
  misc_feature 1..55: note = Synthetic Polynucleotide
  source 1..55: mol_type = other DNA
ggcactgcggctggaggtgggttttagagctagaaatagcaagttaaaataaggc

SEQ ID NO: 338 - DNA, 55 bp, synthetic construct
  misc_feature 1..55: note = Synthetic Polynucleotide
  source 1..55: mol_type = other DNA
gtcatcttagtcattacctggttttagagctagaaatagcaagttaaaataaggc

SEQ ID NO: 339 - DNA, 42 bp, synthetic construct
  misc_feature 1..42: note = Synthetic Polynucleotide
  source 1..42: mol_type = other DNA
attattattattccgcggatttatttatttatttatttattt

SEQ ID NO: 340 - DNA, 40 bp, synthetic construct
  misc_feature 1..40: note = Synthetic Polynucleotide
  source 1..40: mol_type = other DNA
attattattattagctatttatttatttatttatttattt

SEQ ID NO: 341 - DNA, 41 bp, synthetic construct
  misc_feature 1..41: note = Synthetic Polynucleotide
  source 1..41: mol_type = other DNA
attattattattcccggatttatttatttatttatttattt

SEQ ID NO: 342 - DNA, 21 bp, synthetic construct
  misc_feature 1..21: note = Synthetic Polynucleotide
  source 1..21: mol_type = other DNA
aaaaaaagcaccgactcggtg

SEQ ID NO: 343 - DNA, 60 bp, synthetic construct
  misc_feature 1..60: note = Synthetic Polynucleotide
  source 1..60: mol_type = other DNA
taatacgactcactataggccgcggatttatttatttaagttttagagctagaaatagca

SEQ ID NO: 344 - DNA, 60 bp, synthetic construct
  misc_feature 1..60: note = Synthetic Polynucleotide
  source 1..60: mol_type = other DNA
taatacgactcactataggtccgcggatttatttatttagttttagagctagaaatagca

SEQ ID NO: 345 - DNA, 60 bp, synthetic construct
  misc_feature 1..60: note = Synthetic Polynucleotide
  source 1..60: mol_type = other DNA
taatacgactcactataggttccgcggatttatttattagttttagagctagaaatagca

SEQ ID NO: 346 - DNA, 60 bp, synthetic construct
  misc_feature 1..60: note = Synthetic Polynucleotide
  source 1..60: mol_type = other DNA
taatacgactcactataggattccgcggatttatttattgttttagagctagaaatagca

SEQ ID NO: 347 - DNA, 61 bp, synthetic construct
  misc_feature 1..61: note = Synthetic Polynucleotide
  source 1..61: mol_type = other DNA
taatacgactcactataggtattccgcggatttatttatgtttttagagctagaaatagca

SEQ ID NO: 348 - DNA, 60 bp, synthetic construct
  misc_feature 1..60: note = Synthetic Polynucleotide
  source 1..60: mol_type = other DNA
taataacgactcactataggttattccgcggatttatttagtttagagctagaaatagca

SEQ ID NO: 349 - DNA, 60 bp, synthetic construct
  misc_feature 1..60: note = Synthetic Polynucleotide
  source 1..60: mol_type = other DNA
taatacgactcactataggattattccgcggatttatttgttttagagctagaaatagca

SEQ ID NO: 350 - DNA, 60 bp, synthetic construct
  misc_feature 1..60: note = Synthetic Polynucleotide
  source 1..60: mol_type = other DNA
taatacgactcactataggtattattccgcggatttattgttttagagctagaaatagca

SEQ ID NO: 351 - DNA, 60 bp, synthetic construct
  misc_feature 1..60: note = Synthetic Polynucleotide
  source 1..60: mol_type = other DNA
taatacgactcactataggattattatccgcggatttatgttttagagctagaaatagca

SEQ ID NO: 352 - DNA, 60 bp, synthetic construct
  misc_feature 1..60: note = Synthetic Polynucleotide
  source 1..60: mol_type = other DNA
taatacgactcactataggtattatattccgcggatttagttttagagctagaaatagca

SEQ ID NO: 353 - DNA, 60 bp, synthetic construct
  misc_feature 1..60: note = Synthetic Polynucleotide
  source 1..60: mol_type = other DNA
taatacgactcactataggttattatattccgcggatttgttttagagctagaaatagca

SEQ ID NO: 354 - DNA, 60 bp, synthetic construct
  misc_feature 1..60: note = Synthetic Polynucleotide
  source 1..60: mol_type = other DNA
taatacgactcactataggattattatattccgcggattgttttagagctagaaatagca

SEQ ID NO: 355 - DNA, 60 bp, synthetic construct
  misc_feature 1..60: note = Synthetic Polynucleotide
  source 1..60: mol_type = other DNA
taatacgactcactataggtattattatattccgcggatgttttagagctagaaatagca

SEQ ID NO: 356 - DNA, 60 bp, synthetic construct
  misc_feature 1..60: note = Synthetic Polynucleotide
  source 1..60: mol_type = other DNA
taatacgactcactataggattattattattaccgcggagttttagagctagaaatagca

SEQ ID NO: 357 - DNA, 60 bp, synthetic construct
  misc_feature 1..60: note = Synthetic Polynucleotide
  source 1..60: mol_type = other DNA
taatacgactcactataggattattattattattaccgcgttttagagctagaaatagca

SEQ ID NO: 358 - DNA, 60 bp, synthetic construct
  misc_feature 1..60: note = Synthetic Polynucleotide
  source 1..60: mol_type = other DNA
taatacgactcactataggatattaatttatttatttaagttttagagctagaaatagca

SEQ ID NO: 359 - DNA, 60 bp, synthetic construct
  misc_feature 1..60: note = Synthetic Polynucleotide
  source 1..60: mol_type = other DNA
taatacgactcactataggggaggacgtgcgcggccgccgttttagagctagaaatagca

SEQ ID NO: 360 - DNA, 60 bp, synthetic construct
  misc_feature 1..60: note = Synthetic Polynucleotide
  source 1..60: mol_type = other DNA
taatacgactcactataggctgtggcagtggcaccagaagttttagagctagaaatagca

SEQ ID NO: 361 - DNA, 60 bp, synthetic construct
  misc_feature 1..60: note = Synthetic Polynucleotide
  source 1..60: mol_type = other DNA
taatacgactcactatagggaagcgcctggcagtgtaccgttttagagctagaaatagca

SEQ ID NO: 362 - DNA, 60 bp, synthetic construct
  misc_feature 1..60: note = Synthetic Polynucleotide
  source 1..60: mol_type = other DNA
taatacgactcactataggcctcccggccggcggtatccgttttagagctagaaatagca

SEQ ID NO: 363 - DNA, 60 bp, synthetic construct
  misc_feature 1..60: note = Synthetic Polynucleotide
  source 1..60: mol_type = other DNA
taatacgactcactatagggcttgcagatggccatggcggttttagagctagaaatagca

SEQ ID NO: 364 - DNA, 60 bp, synthetic construct
  misc_feature 1..60: note = Synthetic Polynucleotide
  source 1..60: mol_type = other DNA
taatacgactcactataggacacatgcagttgtagtggagttttagagctagaaatagca

SEQ ID NO: 365 - DNA, 60 bp, synthetic construct
  misc_feature 1..60: note = Synthetic Polynucleotide
  source 1..60: mol_type = other DNA
taatacgactcactataggtgtcacacatgtagttgtaggttttagagctagaaatagca

SEQ ID NO: 366 - DNA, 31 bp, synthetic construct
  misc_feature 1..31: note = Synthetic Polynucleotide
  source 1..31: mol_type = other DNA
gtaggtagttaggatgaatggaaggttggta

SEQ ID NO: 367 - DNA, 80 bp, synthetic construct
  misc_feature 1..80: note = Synthetic Polynucleotide
  source 1..80: mol_type = other DNA
gtccatggatccagaggtcatccattaaataaataaatccgcggggctataccaaccttccattcatcctaactacctac

SEQ ID NO: 368 - DNA, 80 bp, synthetic construct
  misc_feature 1..80: note = Synthetic Polynucleotide
  source 1..80: mol_type = other DNA
gtccatggatccagaggtcatccataaataaataaatccgcggaagctataccaaccttccattcatcctaactacctac

SEQ ID NO: 369 - DNA, 80 bp, synthetic construct
  misc_feature 1..80: note = Synthetic Polynucleotide
  source 1..80: mol_type = other DNA
gtccatggatccagaggtcatccataataaataaatccgcggaaggctataccaaccttccattcatcctaactacctac

SEQ ID NO: 370 - DNA, 81 bp, synthetic construct
  misc_feature 1..81: note = Synthetic Polynucleotide
  source 1..81: mol_type = other DNA
gtccatggatccagaggtcatccaaataaataaatccgcggaatggctataccaaccttccattcatcctaaactacctac

SEQ ID NO: 371 - DNA, 80 bp, synthetic construct
  misc_feature 1..80: note = Synthetic Polynucleotide
  source 1..80: mol_type = other DNA
gtccatggatccagaggtcatccaataaataaatccgcggaataggctataccaaccttccattcatcctaactacctac

SEQ ID NO: 372 - DNA, 82 bp, synthetic construct
  misc_feature 1..82: note = Synthetic Polynucleotide
  source 1..82: mol_type = other DNA
gtccatggatccagaggtcatccaataaataaatccgcggaataaggctatatccaaccttccattcatcctaactacctac

SEQ ID NO: 373 - DNA, 79 bp, synthetic construct
  misc_feature 1..79: note = Synthetic Polynucleotide
  source 1..79: mol_type = other DNA
gtccatggatccagaggtcatccaaaataatccgcggaataatggctataccaaccttccattcatcctaactacctac

SEQ ID NO: 374 - DNA, 80 bp, synthetic construct
  misc_feature 1..80: note = Synthetic Polynucleotide
  source 1..80: mol_type = other DNA
gtccatggatccagaggtcatccaaataaatccgcggaataataggctataccaaccttccattcatcctaactacctac

SEQ ID NO: 375 - DNA, 80 bp, synthetic construct
  misc_feature 1..80: note = Synthetic Polynucleotide
  source 1..80: mol_type = other DNA
gtccatggatccagaggtcatccaataaatccgcggataataatggctataccaaccttccattcatcctaactacctac

SEQ ID NO: 376 - DNA, 80 bp, synthetic construct
  misc_feature 1..80: note = Synthetic Polynucleotide
  source 1..80: mol_type = other DNA
gtccatggatccagaggtcatccataaatccgcggaatataataggctataccaaccttccattcatcctaactacctac

SEQ ID NO: 377 - DNA, 80 bp, synthetic construct
  misc_feature 1..80: note = Synthetic Polynucleotide
  source 1..80: mol_type = other DNA
gtccatggatccagaggtcatccaaaatccgcggaatataataaggctataccaaccttccattcatcctaactacctac

SEQ ID NO: 378 - DNA, 80 bp, synthetic construct
  misc_feature 1..80: note = Synthetic Polynucleotide
  source 1..80: mol_type = other DNA
gtccatggatccagaggtcatccaaatccgcggaatataataatggctataccaaccttccattcatcctaactacctac

SEQ ID NO: 379 - DNA, 80 bp, synthetic construct
  misc_feature 1..80: note = Synthetic Polynucleotide
  source 1..80: mol_type = other DNA
gtccatggatccagaggtcatccaatccgcggaatataataataggctataccaaccttccattcatcctaactacctac

SEQ ID NO: 380 - DNA, 80 bp, synthetic construct
  misc_feature 1..80: note = Synthetic Polynucleotide
  source 1..80: mol_type = other DNA
gtccatggatccagaggtcatccatccgcggtaataataataatggctataccaaccttccattcatcctaactacctac

SEQ ID NO: 381 - DNA, 80 bp, synthetic construct
  misc_feature 1..80: note = Synthetic Polynucleotide
  source 1..80: mol_type = other DNA
gtccatggatccagaggtcatccagcggtaataataataataatggctataccaaccttccattcatcctaactacctac

SEQ ID NO: 382 - DNA, 81 bp, synthetic construct
  misc_feature 1..81: note = Synthetic Polynucleotide
  source 1..81: mol_type = other DNA
gtccatggatccagaggtcatccattaaataaataaattaatattactataaccaaccttccattcatcctaactacctac

SEQ ID NO: 383 - DNA, 80 bp, synthetic construct
  misc_feature 1..80: note = Synthetic Polynucleotide
  source 1..80: mol_type = other DNA
  modified_base 44: mod_base = OTHER; note = uracil
gtaggtagttaggatgaatggaaggttggtgtagattattatctgcggatttattggatgacctctggatccatggacat

SEQ ID NO: 384 - DNA, 80 bp, synthetic construct
  misc_feature 1..80: note = Synthetic Polynucleotide
  source 1..80: mol_type = other DNA
gcacctcgccgcggtactgcaccaggcggccgcgcacgtcctccatgtctaccaaccttccattcatcctaactacctac

SEQ ID NO: 385 - DNA, 80 bp, synthetic construct
  misc_feature 1..80: note = Synthetic Polynucleotide
  source 1..80: mol_type = other DNA
cggcgccctcgcgggccccggcctggtacactgccaggcgcttctgcagtaccaaccttccattcatcctaactacctac

SEQ ID NO: 386 - DNA, 80 bp, synthetic construct
  misc_feature 1..80: note = Synthetic Polynucleotide
  source 1..80: mol_type = other DNA
ctcttacctggactctggaatccattctggtgccactgccacagctccttaccaaccttccattcatcctaactacctac

SEQ ID NO: 387 - DNA, 81 bp, synthetic construct
  misc_feature 1..81: note = Synthetic Polynucleotide
  source 1..81: mol_type = other DNA
ggagacgtgcctgttggaacatcctggataccgccggccgggaggagtactaccaaccttccattcatcctaactacctac

SEQ ID NO: 388 - DNA, 80 bp, synthetic construct
  misc_feature 1..80: note = Synthetic Polynucleotide
  source 1..80: mol_type = other DNA
acccccgcccggcacccgcgtccgcgccatggccatctgcaagcagtcataccaaccttccattcatcctaactacctac

SEQ ID NO: 389 - DNA, 80 bp, synthetic construct
  misc_feature 1..80: note = Synthetic Polynucleotide
  source 1..80: mol_type = other DNA
aggttggctctgactgtaccaccatccactacaactgcatgtgtaacagtaccaaggttccattcatcctaactacctac

SEQ ID NO: 390 - DNA, 80 bp, synthetic construct
  misc_feature 1..80: note = Synthetic Polynucleotide
  source 1..80: mol_type = other DNA
tggctctgactgtaccaccatccactacaactacatgtgtgacagttcctaccaaccttccattcatcctaactacctac

SEQ ID NO: 391 - DNA, 60 bp, synthetic construct
  misc_feature 1..60: note = Synthetic Polynucleotide
  source 1..60: mol_type = other DNA
taatacgactcactataggttatttcgtggatttatttagttttagagctagaaatagca

SEQ ID NO: 392 - DNA, 60 bp, synthetic construct
  misc_feature 1..60: note = Synthetic Polynucleotide
  source 1..60: mol_type = other DNA
taatacgactcactataggatatttcgtggatttatttagttttagagctagaaatagca

SEQ ID NO: 393 - DNA, 60 bp, synthetic construct
  misc_feature 1..60: note = Synthetic Polynucleotide
  source 1..60: mol_type = other DNA
taatacgactcactataggctatttcgtggatttatttagttttagagctagaaatagca

SEQ ID NO: 394 - DNA, 60 bp, synthetic construct
  misc_feature 1..60: note = Synthetic Polynucleotide
  source 1..60: mol_type = other DNA
taatacgactcactatagggtatttcgtggatttatttagttttagagctagaaatagca

SEQ ID NO: 395 - DNA, 60 bp, synthetic construct
  misc_feature 1..60: note = Synthetic Polynucleotide
  source 1..60: mol_type = other DNA
taatacgactcactataggtaatttcgtggatttatttagttttagagctagaaatagca

SEQ ID NO: 396 - DNA, 60 bp, synthetic construct
  misc_feature 1..60: note = Synthetic Polynucleotide
  source 1..60: mol_type = other DNA
taatacgactcactataggtcatttcgtggatttatttagttttagagctagaaatagca

SEQ ID NO: 397 - DNA, 60 bp, synthetic construct
  misc_feature 1..60: note = Synthetic Polynucleotide
  source 1..60: mol_type = other DNA
taatacgactcactataggtgatttcgtggatttatttagttttagagctagaaatagca

SEQ ID NO: 398 - DNA, 60 bp, synthetic construct
  misc_feature 1..60: note = Synthetic Polynucleotide
  source 1..60: mol_type = other DNA
taatacgactcactataggttttttcgtggatttatttagttttagagctagaaatagca

SEQ ID NO: 399 - DNA, 60 bp, synthetic construct
  misc_feature 1..60: note = Synthetic Polynucleotide
  source 1..60: mol_type = other DNA
taatacgactcactataggttctttcgtggatttatttagttttagagctagaaatagca

SEQ ID NO: 400 - DNA, 60 bp, synthetic construct
  misc_feature 1..60: note = Synthetic Polynucleotide
  source 1..60: mol_type = other DNA
taatacgactcactataggttgtttcgtggatttatttagttttagagctagaaatagca

SEQ ID NO: 401 - DNA, 60 bp, synthetic construct
  misc_feature 1..60: note = Synthetic Polynucleotide
  source 1..60: mol_type = other DNA
taatacgactcactataggttaattcgtggatttatttagttttagagctagaaatagca

SEQ ID NO: 402 - DNA, 60 bp, synthetic construct
  misc_feature 1..60: note = Synthetic Polynucleotide
  source 1..60: mol_type = other DNA
taatacgactcactataggttacttcgtggatttatttagttttagagctagaaatagca

SEQ ID NO: 403 - DNA, 60 bp, synthetic construct
  misc_feature 1..60: note = Synthetic Polynucleotide
  source 1..60: mol_type = other DNA
taatacgactcactataggttagttcgtggatttatttagttttagagctagaaatagca

SEQ ID NO: 404 - DNA, 60 bp, synthetic construct
  misc_feature 1..60: note = Synthetic Polynucleotide
  source 1..60: mol_type = other DNA
taatacgactcactataggttatatcgtggatttatttagttttagagctagaaatagca

SEQ ID NO: 405 - DNA, 60 bp, synthetic construct
  misc_feature 1..60: note = Synthetic Polynucleotide
  source 1..60: mol_type = other DNA
taatacgactcactataggttatctcgtggatttatttagttttagagctagaaatagca

SEQ ID NO: 406 - DNA, 60 bp, synthetic construct
  misc_feature 1..60: note = Synthetic Polynucleotide
  source 1..60: mol_type = other DNA
taatacgactcactataggttatgtcgtggatttatttagttttagagctagaaatagca

SEQ ID NO: 407 - DNA, 61 bp, synthetic construct
  misc_feature 1..61: note = Synthetic Polynucleotide
  source 1..61: mol_type = other DNA
taatacgactcactataggttattatcgtggatttatttagttttagagctagaaatagca

SEQ ID NO: 408 - DNA, 61 bp, synthetic construct
  misc_feature 1..61: note = Synthetic Polynucleotide
  source 1..61: mol_type = other DNA
taatacgactcactataggttattctcgtggatttatttagttttagagctagaaatagca

SEQ ID NO: 409 - DNA, 61 bp, synthetic construct
  misc_feature 1..61: note = Synthetic Polynucleotide
  source 1..61: mol_type = other DNA
taatacgactcactataggttattgtcgtggatttatttagttttagagctagaaatagca

SEQ ID NO: 410 - DNA, 60 bp, synthetic construct
  misc_feature 1..60: note = Synthetic Polynucleotide
  source 1..60: mol_type = other DNA
taatacgactcactataggttatttcatggatttatttagttttagagctagaaatagca

SEQ ID NO: 411 - DNA, 60 bp, synthetic construct
  misc_feature 1..60: note = Synthetic Polynucleotide
  source 1..60: mol_type = other DNA
taatacgactcactataggttatttcttggatttatttagttttagagctagaaatagca

SEQ ID NO: 412 - DNA, 60 bp, synthetic construct
  misc_feature 1..60: note = Synthetic Polynucleotide
  source 1..60: mol_type = other DNA
taatacgactcactataggttatttcctggatttatttagttttagagctagaaatagca

SEQ ID NO: 413 - DNA, 60 bp, synthetic construct
  misc_feature 1..60: note = Synthetic Polynucleotide
  source 1..60: mol_type = other DNA
taatacgactcactataggttatttcgaggatttatttagttttagagctagaaatagca

SEQ ID NO: 414 - DNA, 60 bp, synthetic construct
  misc_feature 1..60: note = Synthetic Polynucleotide
  source 1..60: mol_type = other DNA
taatacgactcactataggttatttcgcggatttatttagttttagagctagaaatagca

SEQ ID NO: 415 - DNA, 60 bp, synthetic construct
  misc_feature 1..60: note = Synthetic Polynucleotide
  source 1..60: mol_type = other DNA
taatacgactcactataggttatttcggggatttatttagttttagagctagaaatagca

SEQ ID NO: 416 - DNA, 60 bp, synthetic construct
  misc_feature 1..60: note = Synthetic Polynucleotide
  source 1..60: mol_type = other DNA
taatacgactcactataggttatttcgtagatttatttagttttagagctagaaatagca

SEQ ID NO: 417 - DNA, 60 bp, synthetic construct
  misc_feature 1..60: note = Synthetic Polynucleotide
  source 1..60: mol_type = other DNA
taatacgactcactataggttatttcgttgatttatttagttttagagctagaaatagca

SEQ ID NO: 418 - DNA, 60 bp, synthetic construct
  misc_feature 1..60: note = Synthetic Polynucleotide
  source 1..60: mol_type = other DNA
taatacgactcactataggttatttcgtcgatttatttagttttagagctagaaatagca

SEQ ID NO: 419 - DNA, 60 bp, synthetic construct
  misc_feature 1..60: note = Synthetic Polynucleotide
  source 1..60: mol_type = other DNA
taatacgactcactataggttatttcgtgaatttatttagttttagagctagaaatagca

SEQ ID NO: 420 - DNA, 60 bp, synthetic construct
  misc_feature 1..60: note = Synthetic Polynucleotide
  source 1..60: mol_type = other DNA
taatacgactcactataggttatttcgtgtatttatttagttttagagctagaaatagca

SEQ ID NO: 421 - DNA, 60 bp, synthetic construct
  misc_feature 1..60: note = Synthetic Polynucleotide
  source 1..60: mol_type = other DNA
taatacgactcactataggttatttcgtgcatttatttagttttagagctagaaatagca

SEQ ID NO: 422 - DNA, 60 bp, synthetic construct
  misc_feature 1..60: note = Synthetic Polynucleotide
  source 1..60: mol_type = other DNA
taatacgactcactataggttatttcgtggttttatttagttttagagctagaaatagca

SEQ ID NO: 423 - DNA, 60 bp, synthetic construct
  misc_feature 1..60: note = Synthetic Polynucleotide
  source 1..60: mol_type = other DNA
taatacgactcactataggttatttcgtggctttatttagttttagagctagaaatagca

SEQ ID NO: 424 - DNA, 60 bp, synthetic construct
  misc_feature 1..60: note = Synthetic Polynucleotide
  source 1..60: mol_type = other DNA
taatacgactcactataggttatttcgtgggtttatttagttttagagctagaaatagca

SEQ ID NO: 425 - DNA, 60 bp, synthetic construct
  misc_feature 1..60: note = Synthetic Polynucleotide
  source 1..60: mol_type = other DNA
taatacgactcactataggttatttcgtggaattatttagttttagagctagaaatagca

SEQ ID NO: 426 - DNA, 60 bp, synthetic construct
  misc_feature 1..60: note = Synthetic Polynucleotide
  source 1..60: mol_type = other DNA
taatacgactcactataggttatttcgtggacttatttagttttagagctagaaatagca

SEQ ID NO: 427 - DNA, 60 bp, synthetic construct
  misc_feature 1..60: note = Synthetic Polynucleotide
  source 1..60: mol_type = other DNA
taatacgactcactataggttatttcgtggagttatttagttttagagctagaaatagca

SEQ ID NO: 428 - DNA, 60 bp, synthetic construct
  misc_feature 1..60: note = Synthetic Polynucleotide
  source 1..60: mol_type = other DNA
taatacgactcactataggttccccccccgatttatttagttttagagctagaaatagca

SEQ ID NO: 429 - DNA, 60 bp, synthetic construct
  misc_feature 1..60: note = Synthetic Polynucleotide
  source 1..60: mol_type = other DNA
taatacgactcactataggcgcacccgtggatttatttagttttagagctagaaatagca

SEQ ID NO: 430 - DNA, 60 bp, synthetic construct
  misc_feature 1..60: note = Synthetic Polynucleotide
  source 1..60: mol_type = other DNA
taatacgactcactataggctcgcacgtggatttatttagttttagagctagaaatagca

SEQ ID NO: 431 - DNA, 60 bp, synthetic construct
  misc_feature 1..60: note = Synthetic Polynucleotide
  source 1..60: mol_type = other DNA
taatacgactcactataggccctcgcgtggatttatttagttttagagctagaaatagca

SEQ ID NO: 432 - DNA, 60 bp, synthetic construct
  misc_feature 1..60: note = Synthetic Polynucleotide
  source 1..60: mol_type = other DNA
taatacgactcactataggcaccctcgtggatttatttagttttagagctagaaatagca

SEQ ID NO: 433 - DNA, 60 bp, synthetic construct
  misc_feature 1..60: note = Synthetic Polynucleotide
  source 1..60: mol_type = other DNA
taatacgactcactataggtcgcacccgtggatttattagttttagagctagaaatagca

SEQ ID NO: 434 - DNA, 60 bp, synthetic construct
  misc_feature 1..60: note = Synthetic Polynucleotide
  source 1..60: mol_type = other DNA
taatacgactcactataggcctcgcacgtggatttattagttttagagctagaaatagca

SEQ ID NO: 435 - DNA, 60 bp, synthetic construct
  misc_feature 1..60: note = Synthetic Polynucleotide
  source 1..60: mol_type = other DNA
taatacgactcactataggaccctcgcgtggatttattagttttagagctagaaatagca

SEQ ID NO: 436 - DNA, 60 bp, synthetic construct
  misc_feature 1..60: note = Synthetic Polynucleotide
  source 1..60: mol_type = other DNA
taatacgactcactatagggcaccctcgtggatttattagttttagagctagaaatagca

SEQ ID NO: 437 - DNA, 60 bp, synthetic construct
  misc_feature 1..60: note = Synthetic Polynucleotide
  source 1..60: mol_type = other DNA
taatacgactcactatagggagtccgagcagaagaagaagttttagagctagaaatagca

SEQ ID NO: 438 - DNA, 60 bp, synthetic construct
  misc_feature 1..60: note = Synthetic Polynucleotide
  source 1..60: mol_type = other DNA
taatacgactcactataggggaatcccttctgcagcaccgttttagagctagaaatagca

SEQ ID NO: 439 - DNA, 60 bp, synthetic construct
  misc_feature 1..60: note = Synthetic Polynucleotide
  source 1..60: mol_type = other DNA
taatacgactcactatagggaacacaaagcatagactgcgttttagagctagaaatagca

SEQ ID NO: 440 - DNA, 60 bp, synthetic construct
  misc_feature 1..60: note = Synthetic Polynucleotide
  source 1..60: mol_type = other DNA
taatacgactcactataggggcccagactgagcacgtgagttttagagctagaaatagca

SEQ ID NO: 441 - DNA, 60 bp, synthetic construct
  misc_feature 1..60: note = Synthetic Polynucleotide
  source 1..60: mol_type = other DNA
taatacgactcactataggggcactgcggctggaggtgggttttagagctagaaatagca

SEQ ID NO: 442 - DNA, 60 bp, synthetic construct
  misc_feature 1..60: note = Synthetic Polynucleotide
  source 1..60: mol_type = other DNA
taatacgactcactatagggtcatcttagtcattacctggttttagagctagaaatagca

SEQ ID NO: 443 - DNA, 60 bp, synthetic construct
  misc_feature 1..60: note = Synthetic Polynucleotide
  source 1..60: mol_type = other DNA
acgtaaacggccacaagttcttatttcgtggatttatttatggcatcttcttcaaggacg

SEQ ID NO: 444 - DNA, 60 bp, synthetic construct
  misc_feature 1..60: note = Synthetic Polynucleotide
  source 1..60: mol_type = other DNA
acgtaaacggccacaagttcatatttcgtggatttatttatggcatcttcttcaaggacg

SEQ ID NO: 445 - DNA, 60 bp, synthetic construct
  misc_feature 1..60: note = Synthetic Polynucleotide
  source 1..60: mol_type = other DNA
acgtaaacggccacaagttcctatttcgtggatttatttatggcatcttcttcaaggacg

SEQ ID NO: 446 - DNA, 60 bp, synthetic construct
  misc_feature 1..60: note = Synthetic Polynucleotide
  source 1..60: mol_type = other DNA
acgtaaacggccacaagttcgtatttcgtggatttatttatggcatcttcttcaaggacg

SEQ ID NO: 447 - DNA, 60 bp, synthetic construct
  misc_feature 1..60: note = Synthetic Polynucleotide
  source 1..60: mol_type = other DNA
acgtaaacggccacaagttctaatttcgtggatttatttatggcatcttcttcaaggacg

SEQ ID NO: 448 - DNA, 60 bp, synthetic construct
  misc_feature 1..60: note = Synthetic Polynucleotide
  source 1..60: mol_type = other DNA
acgtaaacggccacaagttctcatttcgtggatttatttatggcatcttcttcaaggacg

SEQ ID NO: 449 - DNA, 60 bp, synthetic construct
  misc_feature 1..60: note = Synthetic Polynucleotide
  source 1..60: mol_type = other DNA
acgtaaacggccacaagttctgatttcgtggatttatttatggcatcttcttcaaggacg

SEQ ID NO: 450 - DNA, 60 bp, synthetic construct
  misc_feature 1..60: note = Synthetic Polynucleotide
  source 1..60: mol_type = other DNA
acgtaaacggccacaagttcttttttcgtggatttatttatggcatcttcttcaaggacg

SEQ ID NO: 451 - DNA, 60 bp, synthetic construct
  misc_feature 1..60: note = Synthetic Polynucleotide
  source 1..60: mol_type = other DNA
acgtaaacggccacaagttcttctttcgtggatttatttatggcatcttcttcaaggacg

SEQ ID NO: 452 - DNA, 60 bp, synthetic construct
  misc_feature 1..60: note = Synthetic Polynucleotide
  source 1..60: mol_type = other DNA
acgtaaacggccacaagttcttgtttcgtggatttatttatggcatcttcttcaaggacg

SEQ ID NO: 453 - DNA, 60 bp, synthetic construct
  misc_feature 1..60: note = Synthetic Polynucleotide
  source 1..60: mol_type = other DNA
acgtaaacggccacaagttcttaattcgtggatttatttatggcatcttcttcaaggacg

SEQ ID NO: 454 - DNA, 60 bp, synthetic construct
  misc_feature 1..60: note = Synthetic Polynucleotide
  source 1..60: mol_type = other DNA
acgtaaacggccacaagttcttacttcgtggatttatttatggcatcttcttcaaggacg

SEQ ID NO: 455 - DNA, 60 bp, synthetic construct
  misc_feature 1..60: note = Synthetic Polynucleotide
  source 1..60: mol_type = other DNA
acgtaaacggccacaagttcttagttcgtggatttatttatggcatcttcttcaaggacg

SEQ ID NO: 456 - DNA, 60 bp, synthetic construct
  misc_feature 1..60: note = Synthetic Polynucleotide
  source 1..60: mol_type = other DNA
acgtaaacggccacaagttcttatatcgtggatttatttatggcatcttcttcaaggacg

SEQ ID NO: 457 - DNA, 60 bp, synthetic construct
  misc_feature 1..60: note = Synthetic Polynucleotide
  source 1..60: mol_type = other DNA
acgtaaacggccacaagttcttatctcgtggatttatttatggcatcttcttcaaggacg

SEQ ID NO: 458 - DNA, 60 bp, synthetic construct
  misc_feature 1..60: note = Synthetic Polynucleotide
  source 1..60: mol_type = other DNA
acgtaaacggccacaagttcttatgtcgtggatttatttatggcatcttcttcaaggacg

SEQ ID NO: 459 - DNA, 60 bp, synthetic construct
  misc_feature 1..60: note = Synthetic Polynucleotide
  source 1..60: mol_type = other DNA
acgtaaacggccacaagttcttattacgtggatttatttatggcatcttcttcaaggacg

SEQ ID NO: 460 - DNA, 60 bp, synthetic construct
  misc_feature 1..60: note = Synthetic Polynucleotide
  source 1..60: mol_type = other DNA
acgtaaacggccacaagttcttattccgtggatttatttatggcatcttcttcaaggacg

SEQ ID NO: 461 - DNA, 60 bp, synthetic construct
  misc_feature 1..60: note = Synthetic Polynucleotide
  source 1..60: mol_type = other DNA
acgtaaacggccacaagttcttattgcgtggatttatttatggcatcttcttcaaggacg

SEQ ID NO: 462 - DNA, 60 bp, synthetic construct
  misc_feature 1..60: note = Synthetic Polynucleotide
  source 1..60: mol_type = other DNA
acgtaaacggccacaagttcttatttcatggatttatttatggcatcttcttcaaggacg

SEQ ID NO: 463 - DNA, 60 bp, synthetic construct
  misc_feature 1..60: note = Synthetic Polynucleotide
  source 1..60: mol_type = other DNA
acgtaaacggccacaagttcttatttcttggatttatttatggcatcttcttcaaggacg

SEQ ID NO: 464 - DNA, 60 bp, synthetic construct
  misc_feature 1..60: note = Synthetic Polynucleotide
  source 1..60: mol_type = other DNA
acgtaaacggccacaagttcttatttcctggatttatttatggcatcttcttcaaggacg

SEQ ID NO: 465 - DNA, 60 bp, synthetic construct
  misc_feature 1..60: note = Synthetic Polynucleotide
  source 1..60: mol_type = other DNA
acgtaaacggccacaagttcttatttcgaagatttatttatggcatcttcttcaaggacg

SEQ ID NO: 466 - DNA, 60 bp, synthetic construct
  misc_feature 1..60: note = Synthetic Polynucleotide
  source 1..60: mol_type = other DNA
acgtaaacggccacaagttcttatttcgacgatttatttatggcatcttcttcaaggacg

SEQ ID NO: 467 - DNA, 60 bp, synthetic construct
  misc_feature 1..60: note = Synthetic Polynucleotide
  source 1..60: mol_type = other DNA
acgtaaacggccacaagttcttatttcgaggatttatttatggcatcttcttcaaggacg

SEQ ID NO: 468 - DNA, 60 bp, synthetic construct
  misc_feature 1..60: note = Synthetic Polynucleotide
  source 1..60: mol_type = other DNA
acgtaaacggccacaagttcttatttcgtagatttatttatggcatcttcttcaaggacg

SEQ ID NO: 469 - DNA, 60 bp, synthetic construct
  misc_feature 1..60: note = Synthetic Polynucleotide
  source 1..60: mol_type = other DNA
acgtaaacggccacaagttcttatttcgttgatttatttatggcatcttcttcaaggacg

SEQ ID NO: 470 - DNA, 60 bp, synthetic construct
  misc_feature 1..60: note = Synthetic Polynucleotide
  source 1..60: mol_type = other DNA
acgtaaacggccacaagttcttatttcgtcgatttatttatggcatcttcttcaaggacg

SEQ ID NO: 471 - DNA, 60 bp, synthetic construct
  misc_feature 1..60: note = Synthetic Polynucleotide
  source 1..60: mol_type = other DNA
acgtaaacggccacaagttcttatttcgtgaatttatttatggcatcttcttcaaggacg

SEQ ID NO: 472 - DNA, 60 bp, synthetic construct
  misc_feature 1..60: note = Synthetic Polynucleotide
  source 1..60: mol_type = other DNA
acgtaaacggccacaagttcttatttcgtgtatttatttatggcatcttcttcaaggacg

SEQ ID NO: 473 - DNA, 60 bp, synthetic construct
  misc_feature 1..60: note = Synthetic Polynucleotide
  source 1..60: mol_type = other DNA
acgtaaacggccacaagttcttatttcgtgcatttatttatggcatcttcttcaaggacg

SEQ ID NO: 474 - DNA, 60 bp, synthetic construct
  misc_feature 1..60: note = Synthetic Polynucleotide
  source 1..60: mol_type = other DNA
acgtaaacggccacaagttcttatttcgtggttttatttatggcatcttcttcaaggacg

SEQ ID NO: 475 - DNA, 60 bp, synthetic construct
  misc_feature 1..60: note = Synthetic Polynucleotide
  source 1..60: mol_type = other DNA
acgtaaacggccacaagttcttatttcgtggctttatttatggcatcttcttcaaggacg

SEQ ID NO: 476 - DNA, 60 bp, synthetic construct
  misc_feature 1..60: note = Synthetic Polynucleotide
  source 1..60: mol_type = other DNA
acgtaaacggccacaagttcttatttcgtgggtttatttatggcatcttcttcaaggacg

SEQ ID NO: 477 - DNA, 60 bp, synthetic construct
  misc_feature 1..60: note = Synthetic Polynucleotide
  source 1..60: mol_type = other DNA
acgtaaacggccacaagttcttatttcgtggaattatttatggcatcttcttcaaggacg

SEQ ID NO: 478 - DNA, 60 bp, synthetic construct
  misc_feature 1..60: note = Synthetic Polynucleotide
  source 1..60: mol_type = other DNA
acgtaaacggccacaagttcttatttcgtggacttatttatggcatcttcttcaaggacg

SEQ ID NO: 479 - DNA, 60 bp, synthetic construct
  misc_feature 1..60: note = Synthetic Polynucleotide
  source 1..60: mol_type = other DNA
acgtaaacggccacaagttcttatttcgtggagttatttatggcatcttcttcaaggacg

SEQ ID NO: 480 - DNA, 61 bp, synthetic construct
  misc_feature 1..61: note = Synthetic Polynucleotide
  source 1..61: mol_type = other DNA
acgtaaacggccacaaagtttcgcacccgtggatttatttatggcatcttcttcaaggacg

SEQ ID NO: 481 - DNA, 60 bp, synthetic construct
  misc_feature 1..60: note = Synthetic Polynucleotide
  source 1..60: mol_type = other DNA
acgtaaacggccacaagttcctcgcacgtggatttatttatggcatcttcttcaaggacg

SEQ ID NO: 482 - DNA, 60 bp, synthetic construct
  misc_feature 1..60: note = Synthetic Polynucleotide
  source 1..60: mol_type = other DNA
acgtaaacggccacaagttaccctcgcgtggatttatttatggcatcttcttcaaggacg

SEQ ID NO: 483 - DNA, 60 bp, synthetic construct
  misc_feature 1..60: note = Synthetic Polynucleotide
  source 1..60: mol_type = other DNA
acgtaaacggccacaagttgcaccctcgtggatttatttatggcatcttcttcaaggacg

SEQ ID NO: 484 - DNA, 60 bp, synthetic construct
  misc_feature 1..60: note = Synthetic Polynucleotide
  source 1..60: mol_type = other DNA
acgtaaacggccacaagtattcgcacccgtggatttattatggcatcttcttcaaggacg

SEQ ID NO: 485 - DNA, 60 bp, synthetic construct
  misc_feature 1..60: note = Synthetic Polynucleotide
  source 1..60: mol_type = other DNA
acgtaaacggccacaagtatcctcgcacgtggatttattatggcatcttcttcaaggacg

SEQ ID NO: 486 - DNA, 60 bp, synthetic construct
  misc_feature 1..60: note = Synthetic Polynucleotide
  source 1..60: mol_type = other DNA
acgtaaacggccacaagtataccctcgcgtggatttattatggcatcttcttcaaggacg

SEQ ID NO: 487 - DNA, 60 bp, synthetic construct
  misc_feature 1..60: note = Synthetic Polynucleotide
  source 1..60: mol_type = other DNA
acgtaaacggccacaagtatgcaccctcgtggatttattatggcatcttcttcaaggacg

SEQ ID NO: 488 - DNA, 80 bp, synthetic construct
  misc_feature 1..80: note = Synthetic Polynucleotide
  source 1..80: mol_type = other DNA
gtaggtagttaggatgaatggaaggttggtaggcctgagtccgagcagaagaagaagggctcccatcacatcaaccggtg

SEQ ID NO: 489 - DNA, 80 bp, synthetic construct
  misc_feature 1..80: note = Synthetic Polynucleotide
  source 1..80: mol_type = other DNA
gtaggtagttaggatgaatggaaggttggtactcatggaatcccttctgcagcacctggatcgcttttccgagcttctgg

SEQ ID NO: 490 - DNA, 80 bp, synthetic construct
  misc_feature 1..80: note = Synthetic Polynucleotide
  source 1..80: mol_type = other DNA
gtaggtagttaggatgaatggaaggttggtaaactggaacacaaagcatagactgcggggcgggccagcctgaatagctg

SEQ ID NO: 491 - DNA, 80 bp, synthetic construct
  misc_feature 1..80: note = Synthetic Polynucleotide
  source 1..80: mol_type = other DNA
gtaggtagttaggatgaatggaaggttggtacttggggcccagactgagcacgtgatggcagaggaaaggaagccctgct

SEQ ID NO: 492 - DNA, 80 bp, synthetic construct
  misc_feature 1..80: note = Synthetic Polynucleotide
  source 1..80: mol_type = other DNA
gtaggtagttaggatgaatggaaggttggtaccggtggcactgcggctggaggtgggggttaaagcggagactctggtgc

SEQ ID NO: 493 - DNA, 80 bp, synthetic construct
  misc_feature 1..80: note = Synthetic Polynucleotide
  source 1..80: mol_type = other DNA
gtaggtagttaggatgaatggaaggttggtatggcagtcatcttagtcattacctgaggtgttcgttgtaactcatataa

SEQ ID NO: 494 - DNA, 81 bp, synthetic construct
  misc_feature 1..81: note = Synthetic Polynucleotide
  source 1..81: mol_type = other DNA
gtaggtagttaggatgaatggaaggttggtatggcagtcatcttagtcattaccttgaggtgttcgttgtaactcatataa

SEQ ID NO: 495 - DNA, 53 bp, synthetic construct
  misc_feature 1..53: note = Synthetic Polynucleotide
  source 1..53: mol_type = other DNA
acactctttccctacacgacgctcttccgatctnnnnacgtaaacggccacaa

SEQ ID NO: 496 - DNA, 47 bp, synthetic construct
  misc_feature 1..47: note = Synthetic Polynucleotide
  source 1..47: mol_type = other DNA
tggagttcagacgtgtgctcttccgatctcgtccttgaagaagatgc

SEQ ID NO: 497 - DNA, 60 bp, synthetic construct
  misc_feature 1..60: note = Synthetic Polynucleotide
  source 1..60: mol_type = other DNA
acactctttccctacacgacgctcttccgatctnnnngtaggtagttaggatgaatggaa

SEQ ID NO: 498 - DNA, 47 bp, synthetic construct
  misc_feature 1..47: note = Synthetic Polynucleotide
  source 1..47: mol_type = other DNA
tggagttcagacgtgtgctcttccgatctcaccggttgatgtgatgg

SEQ ID NO: 499 - DNA, 47 bp, synthetic construct
  misc_feature 1..47: note = Synthetic Polynucleotide
  source 1..47: mol_type = other DNA
tggagttcagacgtgtgctcttccgatctccagaagctcggaaaagc

SEQ ID NO: 500 - DNA, 46 bp, synthetic construct
  misc_feature 1..46: note = Synthetic Polynucleotide
  source 1..46: mol_type = other DNA
tggagttcagacgtgtgctcttccgatctcagctattcaggctggc

SEQ ID NO: 501 - DNA, 45 bp, synthetic construct
  misc_feature 1..45: note = Synthetic Polynucleotide
  source 1..45: mol_type = other DNA
tggagttcagacgtgtgctcttccgatctagcagggcttcctttc

SEQ ID NO: 502 - DNA, 44 bp, synthetic construct
  misc_feature 1..44: note = Synthetic Polynucleotide
  source 1..44: mol_type = other DNA
tggagttcagacgtgtgctcttccgatctgcaccagagtctccg

SEQ ID NO: 503 - DNA, 52 bp, synthetic construct
  misc_feature 1..52: note = Synthetic Polynucleotide
  source 1..52: mol_type = other DNA
tggagttcagacgtgtgctcttccgatctttatatgagttacaacgaacacc

SEQ ID NO: 504 - DNA, 57 bp, synthetic construct
  misc_feature 1..57: note = Synthetic Polynucleotide
  source 1..57: mol_type = other DNA
acactctttccctacacgacgctcttccgatctnnnncagctcagcctgagtgttga

SEQ ID NO: 505 - DNA, 48 bp, synthetic construct
  misc_feature 1..48: note = Synthetic Polynucleotide
  source 1..48: mol_type = other DNA
tggagttcagacgtgtgctcttccgatctctcgtgggtttgtggttgc

SEQ ID NO: 506 - DNA, 57 bp, synthetic construct
  misc_feature 1..57: note = Synthetic Polynucleotide
  source 1..57: mol_type = other DNA
acactctttccctacacgacgctcttccgatctnnnncattgcagagaggcgtatca

SEQ ID NO: 507 - DNA, 47 bp, synthetic construct
  misc_feature 1..47: note = Synthetic Polynucleotide
  source 1..47: mol_type = other DNA
tggagttcagacgtgtgctcttccgatctggggtcccaggtgctgac

SEQ ID NO: 508 - DNA, 57 bp, synthetic construct
  misc_feature 1..57: note = Synthetic Polynucleotide
  source 1..57: mol_type = other DNA
acactctttccctacacgacgctcttccgatctnnnnccagccccatctgtcaaact

SEQ ID NO: 509 - DNA, 53 bp, synthetic construct
  misc_feature 1..53: note = Synthetic Polynucleotide
  source 1..53: mol_type = other DNA
tggagttcagacgtgtgctcttccgatcttgaatggattcttggaaacaatga

SEQ ID NO: 510 - DNA, 57 bp, synthetic construct
  misc_feature 1..57: note = Synthetic Polynucleotide
  source 1..57: mol_type = other DNA
acactctttccctacacgacgctcttccgatctnnnnatgtgggctgcctagaaagg

SEQ ID NO: 511 - DNA, 49 bp, synthetic construct
  misc_feature 1..49: note = Synthetic Polynucleotide
  source 1..49: mol_type = other DNA
tggagttcagacgtgtgctcttccgatctcccagccaaacttgtcaacc

SEQ ID NO: 512 - DNA, 57 bp, synthetic construct
  misc_feature 1..57: note = Synthetic Polynucleotide
  source 1..57: mol_type = other DNA
acactctttccctacacgacgctcttccgatctnnnngaacccaggtagccagagac

SEQ ID NO: 513 - DNA, 49 bp, synthetic construct
  misc_feature 1..49: note = Synthetic Polynucleotide
  source 1..49: mol_type = other DNA
tggagttcagacgtgtgctcttccgatcttcctttcaacccgaacggag

SEQ ID NO: 514 - DNA, 60 bp, synthetic construct
  misc_feature 1..60: note = Synthetic Polynucleotide
  source 1..60: mol_type = other DNA
acactctttccctacacgacgctcttccgatctnnnnctcttctttatttccagcaatgt

SEQ ID NO: 515 - DNA, 56 bp, synthetic construct
  misc_feature 1..56: note = Synthetic Polynucleotide
  source 1..56: mol_type = other DNA
tggagttcagacgtgtgctcttccgatctgttttcatgttctaaaaatgtatccca

SEQ ID NO: 516 - DNA, 57 bp, synthetic construct
  misc_feature 1..57: note = Synthetic Polynucleotide
  source 1..57: mol_type = other DNA
acactctttccctacacgacgctcttccgatctnnnntacagtactcccctgccctc

SEQ ID NO: 517 - DNA, 49 bp, synthetic construct
  misc_feature 1..49: note = Synthetic Polynucleotide
  source 1..49: mol_type = other DNA
tggagttcagacgtgtgctcttccgatctgctgctcaccatcgctatct

SEQ ID NO: 518 - DNA, 57 bp, synthetic construct
  misc_feature 1..57: note = Synthetic Polynucleotide
  source 1..57: mol_type = other DNA
acactctttccctacacgacgctcttccgatctnnnncctcatcttgggcctgtgtt

SEQ ID NO: 519 - DNA, 49 bp, synthetic construct
  misc_feature 1..49: note = Synthetic Polynucleotide
  source 1..49: mol_type = other DNA
tggagttcagacgtgtgctcttccgatctaaatcggtaagaggtgggcc

SEQ ID NO: 520 - DNA, 55 bp, synthetic construct
  misc_feature 1..55: note = Synthetic Polynucleotide
  source 1..55: mol_type = other DNA
acactctttccctacacgacgctcttccgatctnnnngcggacatggaggacgtg

SEQ ID NO: 521 - DNA, 47 bp, synthetic construct
  misc_feature 1..47: note = Synthetic Polynucleotide
  source 1..47: mol_type = other DNA
tggagttcagacgtgtgctcttccgatctctgttccaccaggggccc

SEQ ID NO: 522 - DNA, 58 bp, synthetic construct
  misc_feature 1..58: note = Synthetic Polynucleotide
  source 1..58: mol_type = other DNA
acactctttccctacacgacgctcttccgatctnnnntgcccaatcattgatgctttt

SEQ ID NO: 523 - DNA, 56 bp, synthetic construct
  misc_feature 1..56: note = Synthetic Polynucleotide
  source 1..56: mol_type = other DNA
tggagttcagacgtgtgctcttccgatctagaaacatttaccatagactatcacct

SEQ ID NO: 524 - DNA, 59 bp, synthetic construct
  misc_feature 1..59: note = Synthetic Polynucleotide
  source 1..59: mol_type = other DNA
acactctttccctacacgacgctcttccgatctnnnnagtagcctctttctcaatgtgc

SEQ ID NO: 525 - DNA, 50 bp, synthetic construct
  misc_feature 1..50: note = Synthetic Polynucleotide
  source 1..50: mol_type = other DNA
tggagttcagacgtgtgctcttccgatctgctttcacaaggatgcagtct

SEQ ID NO: 526 - DNA, 56 bp, synthetic construct
  misc_feature 1..56: note = Synthetic Polynucleotide
  source 1..56: mol_type = other DNA
acactctttccctacacgacgctcttccgatctnnnngagctagactccgagggga

SEQ ID NO: 527 - DNA, 49 bp, synthetic construct
  misc_feature 1..49: note = Synthetic Polynucleotide
  source 1..49: mol_type = other DNA
tggagttcagacgtgtgctcttccgatcttcctcgtcctgctctcactt

SEQ ID NO: 528 - DNA, 58 bp, synthetic construct
  misc_feature 1..58: note = Synthetic Polynucleotide
  source 1..58: mol_type = other DNA
acactctttccctacacgacgctcttccgatctnnnnagaggctgaagaggaagacca

SEQ ID NO: 529 - DNA, 49 bp, synthetic construct
  misc_feature 1..49: note = Synthetic Polynucleotide
  source 1..49: mol_type = other DNA
tggagttcagacgtgtgctcttccgatctggcccagctgtgcattctat

SEQ ID NO: 530 - DNA, 56 bp, synthetic construct
  misc_feature 1..56: note = Synthetic Polynucleotide
  source 1..56: mol_type = other DNA
acactctttccctacacgacgctcttccgatctnnnnccaagagggccaagtcctg

SEQ ID NO: 531 - DNA, 47 bp, synthetic construct
  misc_feature 1..47: note = Synthetic Polynucleotide
  source 1..47: mol_type = other DNA
tggagttcagacgtgtgctcttccgatctcagcgaggagtgacagcc

SEQ ID NO: 532 - DNA, 57 bp, synthetic construct
  misc_feature 1..57: note = Synthetic Polynucleotide
  source 1..57: mol_type = other DNA
acactctttccctacacgacgctcttccgatctnnnncactccacctgatctcgggg

SEQ ID NO: 533 - DNA, 47 bp, synthetic construct
  misc_feature 1..47: note = Synthetic Polynucleotide
  source 1..47: mol_type = other DNA
tggagttcagacgtgtgctcttccgatctcgaggagggagggagcag

SEQ ID NO: 534 - DNA, 57 bp, synthetic construct
  misc_feature 1..57: note = Synthetic Polynucleotide
  source 1..57: mol_type = other DNA
acactctttccctacacgacgctcttccgatctnnnnaccacaaatgcccaagagac

SEQ ID NO: 535 - DNA, 47 bp, synthetic construct
  misc_feature 1..47: note = Synthetic Polynucleotide
  source 1..47: mol_type = other DNA
tggagttcagacgtgtgctcttccgatctgacacagtcaagggccgg

SEQ ID NO: 536 - DNA, 57 bp, synthetic construct
  misc_feature 1..57: note = Synthetic Polynucleotide
  source 1..57: mol_type = other DNA
acactctttccctacacgacgctcttccgatctnnnncccacctttgaggaggcaaa

SEQ ID NO: 537 - DNA, 51 bp, synthetic construct
  misc_feature 1..51: note = Synthetic Polynucleotide
  source 1..51: mol_type = other DNA
tggagttcagacgtgtgctcttccgatctttccatctgagaagagagtggt

SEQ ID NO: 538 - DNA, 57 bp, synthetic construct
  misc_feature 1..57: note = Synthetic Polynucleotide
  source 1..57: mol_type = other DNA
acactctttccctacacgacgctcttccgatctnnnngtcataccttggcccttcct

SEQ ID NO: 539 - DNA, 47 bp, synthetic construct
  misc_feature 1..47: note = Synthetic Polynucleotide
  source 1..47: mol_type = other DNA
tggagttcagacgtgtgctcttccgatcttccctaggcccacaccag

SEQ ID NO: 540 - DNA, 57 bp, synthetic construct
  misc_feature 1..57: note = Synthetic Polynucleotide
  source 1..57: mol_type = other DNA
acactctttccctacacgacgctcttccgatctnnnnaacccactgaagaagcaggg

SEQ ID NO: 541 - DNA, 49 bp, synthetic construct
  misc_feature 1..49: note = Synthetic Polynucleotide
  source 1..49: mol_type = other DNA
tggagttcagacgtgtgctcttccgatctggtgcttaatccggctccat

SEQ ID NO: 542 - DNA, 57 bp, synthetic construct
  misc_feature 1..57: note = Synthetic Polynucleotide
  source 1..57: mol_type = other DNA
acactctttccctacacgacgctcttccgatctnnnntccagtgtttccatcccgaa

SEQ ID NO: 543 - DNA, 49 bp, synthetic construct
  misc_feature 1..49: note = Synthetic Polynucleotide
  source 1..49: mol_type = other DNA
tggagttcagacgtgtgctcttccgatctcctctgacctccacaactct

SEQ ID NO: 544 - DNA, 57 bp, synthetic construct
  misc_feature 1..57: note = Synthetic Polynucleotide
  source 1..57: mol_type = other DNA
acactctttccctacacgacgctcttccgatctnnnnctgggtacagttctgcgtgt

SEQ ID NO: 545 - DNA, 49 bp, synthetic construct
  misc_feature 1..49: note = Synthetic Polynucleotide
  source 1..49: mol_type = other DNA
tggagttcagacgtgtgctcttccgatcttcactctgagcatcgccaag

SEQ ID NO: 546 - DNA, 60 bp, synthetic construct
  misc_feature 1..60: note = Synthetic Polynucleotide
  source 1..60: mol_type = other DNA
acactctttccctacacgacgctcttccgatctnnnnggtttagagccagtgaactagag

SEQ ID NO: 547 - DNA, 56 bp, synthetic construct
  misc_feature 1..56: note = Synthetic Polynucleotide
  source 1..56: mol_type = other DNA
tggagttcagacgtgtgctcttccgatctgcaagacaaaatcctctttatactttg

SEQ ID NO: 548 - DNA, 55 bp, synthetic construct
  misc_feature 1..55: note = Synthetic Polynucleotide
  source 1..55: mol_type = other DNA
acactctttccctacacgacgctcttccgatctnnnngggaggggacggccttac

SEQ ID NO: 549 - DNA, 47 bp, synthetic construct
  misc_feature 1..47: note = Synthetic Polynucleotide
  source 1..47: mol_type = other DNA
tggagttcagacgtgtgctcttccgatctgcctctggcgaacatggc

SEQ ID NO: 550 - DNA, 57 bp, synthetic construct
  misc_feature 1..57: note = Synthetic Polynucleotide
  source 1..57: mol_type = other DNA
acactctttccctacacgacgctcttccgatctnnnntcctggttaagagcatgggc

SEQ ID NO: 551 - DNA, 49 bp, synthetic construct
  misc_feature 1..49: note = Synthetic Polynucleotide
  source 1..49: mol_type = other DNA
tggagttcagacgtgtgctcttccgatctgattgagtccccacagcaca

SEQ ID NO: 552 - DNA, 57 bp, synthetic construct
  misc_feature 1..57: note = Synthetic Polynucleotide
  source 1..57: mol_type = other DNA
acactctttccctacacgacgctcttccgatctnnnnccagtgtttcccatccccaa

SEQ ID NO: 553 - DNA, 50 bp, synthetic construct
  misc_feature 1..50: note = Synthetic Polynucleotide
  source 1..50: mol_type = other DNA
tggagttcagacgtgtgctcttccgatcttgacctccacaactggaaaat

SEQ ID NO: 554 - DNA, 57 bp, synthetic construct
  misc_feature 1..57: note = Synthetic Polynucleotide
  source 1..57: mol_type = other DNA
acactctttccctacacgacgctcttccgatctnnnngcttccagacccacctgaag

SEQ ID NO: 555 - DNA, 50 bp, synthetic construct
  misc_feature 1..50: note = Synthetic Polynucleotide
  source 1..50: mol_type = other DNA
tggagttcagacgtgtgctcttccgatctaccgaggaaaattgcttgtcg

SEQ ID NO: 556 - DNA, 58 bp, synthetic construct
  misc_feature 1..58: note = Synthetic Polynucleotide
  source 1..58: mol_type = other DNA
acactctttccctacacgacgctcttccgatctnnnngtgtggagagtgagtaagcca

SEQ ID NO: 557 - DNA, 50 bp, synthetic construct
  misc_feature 1..50: note = Synthetic Polynucleotide
  source 1..50: mol_type = other DNA
tggagttcagacgtgtgctcttccgatctacggtaggatgatttcaggca

SEQ ID NO: 558 - DNA, 58 bp, synthetic construct
  misc_feature 1..58: note = Synthetic Polynucleotide
  source 1..58: mol_type = other DNA
acactctttccctacacgacgctcttccgatctnnnncacaaagcagtgtagctcagg

SEQ ID NO: 559 - DNA, 54 bp, synthetic construct
  misc_feature 1..54: note = Synthetic Polynucleotide
  source 1..54: mol_type = other DNA
tggagttcagacgtgtgctcttccgatcttttttggtactcgagtgttattcag

SEQ ID NO: 560 - DNA, 57 bp, synthetic construct
  misc_feature 1..57: note = Synthetic Polynucleotide
  source 1..57: mol_type = other DNA
acactctttccctacacgacgctcttccgatctnnnntcccctgttgacctggagaa

SEQ ID NO: 561 - DNA, 49 bp, synthetic construct
  misc_feature 1..49: note = Synthetic Polynucleotide
  source 1..49: mol_type = other DNA
tggagttcagacgtgtgctcttccgatctcactgtacttgccctgacca

SEQ ID NO: 562 - DNA, 57 bp, synthetic construct
  misc_feature 1..57: note = Synthetic Polynucleotide
  source 1..57: mol_type = other DNA
acactctttccctacacgacgctcttccgatctnnnnttggtgttgacagggagcaa

SEQ ID NO: 563 - DNA, 49 bp, synthetic construct
  misc_feature 1..49: note = Synthetic Polynucleotide
  source 1..49: mol_type = other DNA
tggagttcagacgtgtgctcttccgatctctgagatgtgggcagaaggg

SEQ ID NO: 564 - DNA, 57 bp, synthetic construct
  misc_feature 1..57: note = Synthetic Polynucleotide
  source 1..57: mol_type = other DNA
acactctttccctacacgacgctcttccgatctnnnntgagagggaacagaagggct

SEQ ID NO: 565 - DNA, 49 bp, synthetic construct
  misc_feature 1..49: note = Synthetic Polynucleotide
  source 1..49: mol_type = other DNA
tggagttcagacgtgtgctcttccgatgtgtccaaaggcccaagaacct

SEQ ID NO: 566 - DNA, 58 bp, synthetic construct
  misc_feature 1..58: note = Synthetic Polynucleotide
  source 1..58: mol_type = other DNA
acactctttccctacacgacgctcttccgatctnnnntcctagcactttggaaggtcg

SEQ ID NO: 567 - DNA, 51 bp, synthetic construct
  misc_feature 1..51: note = Synthetic Polynucleotide
  source 1..51: mol_type = other DNA
tggagttcagacgtgtgctcttccgatctgctcatcttaatctgctcagcc

SEQ ID NO: 568 - DNA, 57 bp, synthetic construct
  misc_feature 1..57: note = Synthetic Polynucleotide
  source 1..57: mol_type = other DNA
acactctttccctacacgacgctcttccgatctnnnnaaaggagcagctcttcctgg

SEQ ID NO: 569 - DNA, 49 bp, synthetic construct
  misc_feature 1..49: note = Synthetic Polynucleotide
  source 1..49: mol_type = other DNA
tggagttcagacgtgtgctcttccgatctgtctgcaccatctcccacaa

SEQ ID NO: 570 - DNA, 57 bp, synthetic construct
  misc_feature 1..57: note = Synthetic Polynucleotide
  source 1..57: mol_type = other DNA
acactctttccctacacgacgctcttccgatctnnnnggcatggcttctgagactca

SEQ ID NO: 571 - DNA, 53 bp, synthetic construct
  misc_feature 1..53: note = Synthetic Polynucleotide
  source 1..53: mol_type = other DNA
tggagttcagacgtgtgctcttccgatctgtctcccttgcactccctgtcttt

SEQ ID NO: 572 - DNA, 57 bp, synthetic construct
  misc_feature 1..57: note = Synthetic Polynucleotide
  source 1..57: mol_type = other DNA
acactctttccctacacgacgctcttccgatctnnnntttggcaatggaggcattgg

SEQ ID NO: 573 - DNA, 49 bp, synthetic construct
  misc_feature 1..49: note = Synthetic Polynucleotide
  source 1..49: mol_type = other DNA
tggagttcagacgtgtgctcttccgatctgaagaggctgcccatgagag

SEQ ID NO: 574 - DNA, 57 bp, synthetic construct
  misc_feature 1..57: note = Synthetic Polynucleotide
  source 1..57: mol_type = other DNA
acactctttccctacacgacgctcttccgatctnnnnggtctgaggctcgaatcctg

SEQ ID NO: 575 - DNA, 49 bp, synthetic construct
  misc_feature 1..49: note = Synthetic Polynucleotide
  source 1..49: mol_type = other DNA
tggagttcagacgtgtgctcttccgatctctgtggcctccatatccctg

SEQ ID NO: 576 - DNA, 57 bp, synthetic construct
  misc_feature 1..57: note = Synthetic Polynucleotide
  source 1..57: mol_type = other DNA
acactctttccctacacgacgctcttccgatctnnnntttccaccagaactcagccc

SEQ ID NO: 577 - DNA, 49 bp, synthetic construct
  misc_feature 1..49: note = Synthetic Polynucleotide
  source 1..49: mol_type = other DNA
tggagttcagacgtgtgctcttccgatctcctcggttcctccacaacac

SEQ ID NO: 578 - DNA, 57 bp, synthetic construct
  misc_feature 1..57: note = Synthetic Polynucleotide
  source 1..57: mol_type = other DNA
acactctttccctacacgacgctcttccgatctnnnncacgggaaggacaggagaag

SEQ ID NO: 579 - DNA, 49 bp, synthetic construct
  misc_feature 1..49: note = Synthetic Polynucleotide
  source 1..49: mol_type = other DNA
tggagttcagacgtgtgctcttccgatctgcaggggagggataaagcag

SEQ ID NO: 580 - DNA, 200 bp, synthetic construct
  misc_feature 1..200: note = Synthetic Polynucleotide
  source 1..200: mol_type = other DNA
tcatctgtgcccctccctccctggcccaggtgaaggtgtggttccagaaccggaggacaaagtacaaacggcagaagctggaggaggaagggcctgagtttgagcagaagaagaagggctcccatcacatcaaccggtggcgcattgccacgaagcaggccaatggggaggacatcgatgtcacctccaatgactagggt

SEQ ID NO: 581 - DNA, 200 bp, synthetic construct
  misc_feature 1..200: note = Synthetic Polynucleotide
  source 1..200: mol_type = other DNA
accctagtcattggaggtgacatcgatctcctccccattggcctgcttcgtggcaatgcgccaccggttgatgtgatgggagcccttcttcttctgctcaaactcaggcccttcctcctccagcttctgccgtttgtactttgtcctccggttctggaaccacaccttcacctgggccagggagggaggggcacagatga

SEQ ID NO: 582 - DNA, 201 bp, synthetic construct
  misc_feature 1..201: note = Synthetic Polynucleotide
  source 1..201: mol_type = other DNA
catgcaattagtctatttctgctgcaagtaagcatgcatttgtaggcttgatgctttttttctgcttctccagccctggcctgggtcaatccttggggcttagactgagcacgtgatggcagaggaaaggaagccctgcttcctccagagggcgtcgcaggacagcttttcctagacagggggctagtatgtgcagctcct

SEQ ID NO: 583 - DNA, 200 bp, synthetic construct
  misc_feature 1..200: note = Synthetic Polynucleotide
  source 1..200: mol_type = other DNA
aggagctgcacatactagcccctgtctaggaaaagctgtcctgcgacgccctctggaggaagcagggcttcctttcctctgccatcacgtgctcagtctaagccccaaggattgacccaggccagggctggagaagcagaaaaaaagcatcaagcctacaaatgcatgcttacttgcagcagaaatagactaattgcatc

SEQ ID NO: 584 - DNA, 200 bp, synthetic construct
  misc_feature 1..200: note = Synthetic Polynucleotide
  source 1..200: mol_type = other DNA
ggctgacaaaggccgggctgggtggaaggaagggaggaagggcgaggcagagggtccaaagcaggatgacaggcaggggcaccgcggcgccccggtggcattgcggctggaggtgggggttaaagcggagactctggtgctgtgtgactacagtgggggccctgccctctctgagcccccgcctccaggcctgtgtgtgt

SEQ ID NO: 585 - DNA, 200 bp, synthetic construct
  misc_feature 1..200: note = Synthetic Polynucleotide
  source 1..200: mol_type = other DNA
acacacacaggcctggaggcgggggctcagagagggcagggcccccactgtagtcacacagcaccagagtctccgctttaacccccacctccagccgcaatgccaccggggcgccgcggtgcccctgcctgtcatcctgctttggaccctctgcctcgcccttcctcccttccttccacccagcccggcctttgtcagcc

SEQ ID NO: 586 - DNA, 661 bp, synthetic construct
  misc_feature 1..661: note = Synthetic Polynucleotide
  source 1..661: mol_type = other DNA
catccttggtaccgagctcggatccagccaccatggatagcctcttgatgaatagacgcaagttcctgtatcagtttaaaaacgtgagatgggcaaaaggccgacgagagacatatctgtgctatgtcgttaagcgcagagattcagccaccagtttctctctcgacttcggctacctgcggaacaagaatggttgccatgttgagctcctgttcctgaggtatatcagcgactgggatttggacccagggcggtgctatagggtgacatggtttacctcctggtcaccttgttatgactgcgcgcggcatgttgccgattttctgagagggaaccctaacctgtctctgaggatcttcaccgcgcgactgtacttctgtgaggaccggaaagccgaacccgagggactgagacgcctccacagagcgggtgtgcagattgccataatgacctttaaggactacttctactgctggaacaccttcgtcgaaaatcacgagcggactttcaaggcttgggaaggattgcatgaaaacagcgtcaggctttccaggcagcttcgccgcattcttctcccgttgtacgaggttgatgacctcagagatgcctttagaacactgggactgtaggcggccgctcgattggtttggtgtggctctaa

SEQ ID NO: 587 - DNA, 755 bp, Homo sapiens
  source 1..755: mol_type = genomic DNA
catccttggtaccgagctcggatccagccaccatgagctcagagactggcccagtggctgtggaccccacattgagacggcggatcgagccccatgagtttgaggtattcttcgatccgagagagctccgcaaggagacctgcctgctttacgaaattaattgggggggccggcactccatttggcgacatacatcacagaacactaacaagcacgtcgaagtcaacttcatcgagaagttcacgacagaaagatatttctgtccgaacacaaggtgcagcattacctggtttctcagctggagcccatgcgggcgaatgtagtagggccatcactgaattcctgtcaaggtatccccacgtcactctgtttatttacatcgcaaggctgtaccaccacgctgacccccgcaatcgacaaggcctgcgggatttgatctcttcaggtgtgactatccaaattatgactgagcaggagtcaggatactgctggagaaactttctgaattatagcccgagtaatgaagcccactggcctaggtatccccatctgtgggtacgactgtacgttcttgaactgtactgcatcatactgggcctgcctccttgtctcaacattctgagaaggaagcagccacagctgacattctttaccatcgctcttcagtcttgtcattaccagcgactgcccccacacattctctgggccaccgggttgaaatgagcggccgctcgattggtttggtgtggctctaa

SEQ ID NO: 588 - DNA, 694 bp, synthetic construct
  misc_feature 1..694: note = Synthetic Polynucleotide
  source 1..694: mol_type = other DNA
catccttggtaccgagctcggatccagccaccatgacagacgctgaatatgttaggatccatgaaaaactggatatctatacatttaagaagcagttcttcaataacaaaaagtcagtatctcacagatgctatgtcctgttcgaactcaagagaagaggagagaaaggcgggcctgtttctgggggtacgcggttaataaaccccagtccgggaccgagaggggggattcacgccgagatcttttcaattaggaaggttgaagagtatcttcgcgacaatcccggtcagttcacaattaactggtacagctcctggagcccttgcgctgattgcgccgagaaaatactcgaatggtacaaccaggacttgagaggcaatggccacactctcaagatttgggcttgcaagctttactacgagaagaacgcgagaaatcagattggcttgtggaacctcagggacaacggggtcgggttgaatgttatggtgtccgaacattaccagtgctgtagaaagatcttcattcagtccagtcacaatcagctgaacgagaacagatggctggagaaaacactgaaacgggcagagaaaaggcgctcagagctgagtatcatgatccaggtcaaaatcctgcatacaaccaaaagcccggctgtataagcggccgctcgattggtttggtgtggctctaa

SEQ ID NO: 589 - DNA, 1045 bp, synthetic construct
  misc_feature 1..1045: note = Synthetic Polynucleotide
  source 1..1045: mol_type = other DNA
catccttggtaccgagctcggatccagccaccatggagctgaagtatcaccctgagatgcggtttttccactggtttagtaagtggcgcaaacttcatcgggatcaggagtatgaagtgacctggtatatctcttggtctccctgcacaaaatgtacacgcgavatggaaacatttctggccgaggatccaaaggtgacgctcacaaatctttgtggcccgcctgtattatttctgggacccggattatcaggaggcacttaggtcattgtgccaaaagcgcgacggaccacgggcgactatgaaaatcatgaattatgacgaattccagcattgctggagtaagtttgtgtacagccagcgggagctgttcgagccctggaacaatcttcccaagtactacatactgcttcacattatgttgggggagatccttcggcactctatggatcctcctaccctttacgtttaaactttaataatgagccttgggttcgcgggcgccatgaaacctatttgtgctacgaggtcgagcggatccataatgatacgtgggtcctgctgaatcagaggagggggtttctgtgtaaccaggctccacataaagatggatttctcgaggggcggcacgccgaactgtgtttccttgatgtgatacctttctggaagctcgaccttgatcaagattacagggtgacgtgtttcacctcctggtcaccctgcttcagttgcgcccaagagatggctaaatttagcagtaagaacaagcatgtgtccctctgtatttttacagccagaatttatgatgaccagggccggtgccaggaggggctgcggacactcgctgaggcgggcgcgaagatcagcataatgacatactccgaattcaaacactgttgggacacttttgtggaccaccagggctgcccatttcagccgtgggatgggctcgacgaacatagtcaggatctctcaggccggctgcgagccatattgcagaaccaggagaattaggcggccgctcgattggtttggtgtggctctaa

SEQ ID NO: 590 - DNA, 785 bp, Escherichia coli
  source 1..785: mol_type = genomic DNA
ggccggggattctagaaataattttgtttaactttaagaaggagatataccatggatgtcttctgaaaccggtccggttgcggttgacccgaccctgcgtcgtcgtatcgaaccgcacgaattcgaagttttcttcgaccccgcgtgaactgcgtaaagaaacctgcctgctgtacgaaatcaactggggtggtcgtcactctatctggcgtcacacctctcagaacaccaacaaacacgttgaagttaacttcatcgaaaaattcaccaccgaacgttacttctgcccgaacacccgttgctctatcacctggttcctgtcttggtctccgtgcggtgaatgctcctcgtgcgatcaccgaattcctgtctcgttacccgcacgttaccctgttcatctacatcgcgcgtctgtaccaccacgcggacccgcgtaaccgtcagggtctgcgtgacctgatctcttctggtgttaccatccagatcatgaccgaacaggaatctggttactgctggcgtaacttcgttaactactctccgtctaacgaagcgcactggccgcgttacccgcacctgtgggttcgtctgtacgttctggaactgtactgcatcatcctgggtctgccgccgtgcctgaacatcctgcgtcgtaaacagccgcagctgacctcttcaccatcgcgctgcagtcttgccactaccagcgtctgccgccgcacatcctgtgggcgaccggtctgaaaggtggtagtggagggagcggcggttcaatggataagaaatac

SEQ ID NO: 591 - protein, 772 aa, synthetic construct
  REGION 1..772: note = Synthetic Polypeptide
MGSSHHHHHHMSSETGPVAVDPTLRRRIEPHEFEVEFDPRELRKETCLLYEINWGGRHSIWRHTSQNTNKHVEVNFIEKFTTERYFCPNTRCSITWFLSWSPCGECSRAITEFLSRYPHVTLFIYIARLYHHADPRNRQGLVKVMGRHKPENIVIEMARENQTTQKGQKNSRERMKRIEEGIKELGSQILKEHPVENTQLQNEKLYLYYLQNGRDMYVDQELDINRLSDYDVDAIVPQSFLKDDSIDNKVLTRSDKNRGKSDNVPSEEVVKKMKNYWRQLLNAKLITQRKFDNLTKAERGGLSELDKAGFIKRQLVETRQITKHVAQILDSRMNTKYDENDKLIREVKVITLKSKLVSDFRKDFQFYKVREINNYHHAHDAYLNAVVGTALIKKYPKLESEFVYGDYKVYDVRKMIAKSEQEIGKATAKYFFYSNIMNFFKTEILANGEIRKRPLIETNGETGEIVWDKGRDFATVRKVLSMPQVNIVKKTEVQTGGFSKESILPKRNSDKLIARKKDWDPKKYGGFDSPTVAYSVLVVAKVEKGKSKKLKSVKELLGITIMERSSFEKNPIDFLEAKGYKEVKKDLIIKLPKYSLFELENGRKRMLASAGELQKGNELALPSKYVNFLYLASHYEKLKGSPEDNEQKQLFVEQHKHYLDEIIEQISEFSKRVILADANLDKVLSAYNKHRDKPIREQAENIIHLFTLTNLGAPAAFKYFDTTIDRKRYTSTKEVLDATLIHQSITGLYETRIDLSQLGGDSGGSPKKKRKV

SEQ ID NO: 592 - protein, 1622 aa, synthetic construct
  REGION 1..1622: note = Synthetic Polypeptide
MSSETGPVAVDPTLRRRIEPHEFEVFFDPRELRKETCLLYEINWGGRHSIWRHTSQNTNKHVEVNFIEKFTTERYFCPNTRCSITWFLSWSPCGECSRAITEFLSRYPHVTLFIYIARLYHHADPRNRQGLRDLISSGVTIQIMTEQESGYCWRNFVNYSPSNEAHWPRYPHLWVRLYVLELYCIILGLPPCLNILRRKQPQLTFFTIALQSCHYQRLPPHILWATGLKSGSETPGTSESATPESDKKYSIGLAIGTNSVGWAVITDEYKVPSKKFKVLGNTDRHSIKKNLIGALLFDSGETAEATRLKRTARRRYTRRKNRICYLQEIFSNEMAKVDDSFFHRLEESFLVEEDKKHERHPIFGNIVDEVAYHEKYPTIYHLRKKLVDSTDKADLRLIYLALAHMIKFRGHFLIEGDLNPDNSDVDKLFIQLVQTYNQLFEENPINASGVDAKAILSARLSKSRRLENLIAQLPGEKKNGLFGNLIALSLGLTPNFKSNFDLAEDAKLQLSKDTYDDDLDNLLAQIGDQYADLFLAAKNLSDAILLSDILRVNTEITKAPLSASMIKRYDEHHQDLTLLKALVRQQLPEKYKEIFFDQSKNGYAGYIDGGASQEEFYKFIKPILEKMDGTEELLVKLNREDLLRKQRTFDNGSIPHQIHLGELHAILRRQEDFYPFLKDNREKIEKILTFRIPYYVGPLARGNSRFAWMFRKSEETITPWNFEEVVDKGASAQSFIERMTNFDKNLPNEKVLPKHSLLYEYFTVYNELTKVKYVTEGMRKPAFLSGEQKKAIVDLLFKTNRKVTVKQLKEDYFKKIECFDSVEISGVEDRFNASLGTYHDLLKIIKDKDFLDNEENEDILEDIVLTLTLFEDREMIEERLKTYAHLFDDKVMKQLKRRRYTGWGRLSKLINGIRDKQSGKTILDFLKSDGFANRNFMQLIHDDSLTFKEDIQKAQVSGQGDSLHEHIANLAGSPAIKKGILQTVKVVDELVKVMGRHKPENIVIEMARENQTTQKGQKNSRERMKRIEEGIKELGSQILKEHPVENTQLQNEKLYLYYLQNGRDMYVDQELDINRLSDYDVDAIVPQSFLKDDSIDNKVLTRSDKNRGKSDNVPSEEVVKKMKNYWRQLLNAKLITQRKFDNLTKAERGGLSELDKAGFIKRQLVETRQITKHVAQILDSRMNTKYDENDKLIREVKVITLKSKLVSDFRKDFQFYKVREINNYHHAHDAYLNAVVGTALIKKYPKLESEFVYGDYKVYDVRKMIAKSEQEIGKATAKYFFYSNIMNFFKTEITLANGEIRKRPLIETNGETGEIVWDKGRDFATVRKVLSMPQVNIVKKTEVQTGGFSKESILPKRNSDKLIARKKDWDPKKYGGFDSPTVAYSVLVVAKVEKGKSKKLKSVKELLGITIMERSSFEKNPIDFLEAKGYKEVKKDLIIKLPKYSLFELENGRKRMLASAGELQKGNELALPSKYVNFLYLASHYEKLKGSPEDNEQKQLFVEQHKHYLDEIIEQISEFSKRVILADANLDKVLSAYNKHRDKPIREQAENIIHLFTLTNLGAPAAFKYFDTTIDRKRYTSTKEVLDATLIHQSITGLYETRIDLSQLGGDSGGSPKKKRKV

SEQ ID NO: 593 - protein, 1709 aa, synthetic construct
  REGION 1..1709: note = Synthetic Polypeptide
MSSETGPVAVDPTLRRRIEPHEFEVFFDPRELRKETCLLYEINWGGRHSIWRHTSQNTNKHVEVNFIEKFTTERYFCPNTRCSITWFLSWSPCGECSRAITEFLSRYPHVTLFIYIARLYHHADPRNRQGLRDLISSGVTIQIMTEQESGYCWRNFVNYSPSNEAHWPRYPHLWVRLYVLELYCIILGLPPCLNILRRKQPQLTFFTIALQSCHYQRLPPHILWATGLKSGSETPGTSESATPESDKKYSIGLAIGTNSVGWAVITDEYKVPSKKFKVLGNTDRHSIKKNLIGALLFDSGETAEATRLKRTARRRYTRRKNRICYLQEIFSNEMAKVDDSFFHRLEESFLVEEDKKHERHPIFGNIVDEVAYHEKYPTIYHLRKKLVDSTDKADLRLIYLALAHMIKFRGHFLIEGDLNPDNSDVDKLFIQLVQTYNQLFEENPINASGVDAKAILSARLSKSRRLENLIAQLPGEKKNGLFGNLIALSLGLTPNFKSNFDLAEDAKLQLSKDTYDDDLDNLLAQIGDQYADLFLAAKNLSDAILLSDILRVNTEITKAPLSASMIKRYDEHHQDLTLLKALVRQQLPEKYEILFFDQSKNGYAGYIDGGASQEEFYKFIKPILEKMDGTEELLVKLNREDLLRKQRTFDNGSIPHQIHLGELHAILRRQEDFYPFLKDNREKIEKILTFRIPYYVGPLARGNSRFAWMTRKSEETITPWNFEEVVDKGASAQSFIERMTNFDKNLPNEKVLPKHSLLYEYFTVYNELYKVKYVTEGMRKPAFLSGEQKKAIVDLLFKTNRKVTVKQLKEDYFKKIECFDSVEISGVEDRFNASLGTYHDLLKIIKDKDFLDNEENEDILEDIVLTLTLFEDREMIEERLKTYAHLFDDKVMKQLKRRRYTGWGRLSRKLINGIRDKQSGKTILDFLKSDGFANRNFMQLIHDDSLTFKEDIQKAQVSGQGDSLHEHIANLAGSPAIKKGILQTVKVVDELVKVMGRHKPENIVIEMARENQTTQKGQKNSRERMKRIEEGIKELGSQILKEHPVENTQLQNEKLYLYYLQNGRDMYVDQELDINRLSDYDVDAIVPQSFLKDDSIDNKVLTRSDKNRGKSDNVPSEEVVKKMKNYWRQLLNAKLITQRKFDNLTKAERGGLSELDKAGFIKRQLVETRQITKHVAQILDSRMNTKYDENDKLIREVKVITLKSKLVSDFRKDFQFYKVREINNYHHAHDAYLNAVVGYALIKKYPKLESEFVYGDYKVYDVRKMIAKSEQEIGKATAKYFFYSNIMNFFKTEITLANGEIRKRPLIETNGETGEIVWDKGRDFATVRKVLSMPQVNIVKKTEVQTGGFSKESILPKRNSDKLIARKKDWDPKKYGGFDSPTVAYSVLVVAKVEKGKSKKLKSVKELLGITIMERSSFEKNPIDFLEAKGYKEVKKDLIIKLPKYSLFELENGRKRMLASAGELQKGNELALPSKYVNFLYLASHYEKLKGSPEDNEQKQLFVEQHKHYLDEIIEQISEFSKRVILADANLDKVLSAYNKHRDKPIREQAENIIHLFTLTNLGAPAAFKYFDTTIDRKRYTSTKEVLDATLIHQSITGLYETRIDLSQLGGDSGGSTNLSDIIEKETGKQLVIQESILMLPEEVEEVIGNKPESDILVHTAYDESTDENVMLLSDAPEYKPWALVIQDSNGENKIKMLSGGSPKKKRKV

SEQ ID NO: 594 - protein, 1708 aa, synthetic construct
  REGION 1..1708: note = Synthetic Polypeptide
MSSETGPVAVDPTLRRRIEPHEFEVFFDPRELRKETCLLYEINWGGRHSIWRHTSQNTNKHVEVNFIEKFTTERYFCPNTRCSITWFLSWSPCGECSRAITEFLSRYPHVTLFIYIARLYHHADPRNRQGLRDLISSGVTIQIMTEQESGYCWRNFVNYSPSNEAHWPRYPHLWVRLYVLELYCIILGLPPCLNILRRKQPQLTFFTIALQSCHYQRLPPHILWATGLKSGSETPGTSESATPESDKKYSIGLAIGTNSVGWAVITDEYKVPSKKFKVLGNTDRHSIKKNLIGALFDSGETAEATRLKRTARRRYTRRKNRICYLQEIFSNEMAKVDDSFFHRLEESFLVEEDKKHERHPIFGNIVDEVAYHEKYPTIYHLRKKLVDSTDKADLRLIYLALAHMIKFRGHFLIEGDLNPDNSDVDKLFIQLVQTYNQLFEENPINASGVDAKAILSARLSKSRRLENLIAQLPGEKKNGLFGNLIALSLGLTPNFKSNFDLAEDAKLQLSKDTYDDDLDNLLAQIGDQYADLFLAAKNLSDAILLSDILRVNTEITKAPLSASMIKRYDEHHQDLTLLKALVRQQLPEKYKEIFFDQSKNGYAGYIDGGASQEEFYKFIKPILEKMDGTEELLVKLNREDLLRKQRTFDNGSIPHQIHLGELHAILRRQEDFYPFLKDNREDIEKILTFRIPYYVGPLARGNSRFAWMTRKSEETITPWNFEEVVDKGASAQSFIERMTNDKNLPNEKVLPKHSLLYEYFTVYNELTKVKYVTEGMRKPAFLSSGEQKKAIVDLLFKTNRKVTVKQLKEDYFKKIECFDSVEISGVEDRFNASLGTYGDLLKIIKDIDFLDNEENEDILEDIVLTLTLFEDREMIEERLKTYAHLFDDKVMKQLKRRRYTGWGRLSRKLINGIRDKQSGKTILDFLKSDGFANRNFMQLIHDDSLTFKEDIQKAQVSGQGDSLHEHIANLAGSPAIKKGILQTVKVVDELVKVMGRHKPENIVIEMARENQTTQKGQKNSRERMKRIEEGIKELGSQILKEHPVENTQLQNEKLYLYYLQNGRDMYVDQELDINRLSDYDVDHIVPQSFLKDDSIDNKVLTRSDKNRGKSDNVPSEEVVKKMKNYWRQLLNAKLITQRKFDLTKAERGGLSELDKAGFIKRQLVETRQITKHVAQILDSRMNTKYDENDKLIREVKVITLKSKLVSDFRKDFQFYKVREINNYHHAHDAYLNAVVGTALIKKYPKLESEFVYGDYKVYDVRKMIAKSEQEIGKATAKYFFYSNIMNFFKTEITLANGEIRKRPLIETNGETGEIVWDKGRDFATVRKVLSMPQVNIVKKTEVQTGGFSKESILPKRNSDKLIARKKDWDPKKYGGFDSPTVAYSVLVVAKVEKGKSKKLKSVKELLGITIMERSSFEKNPIDFLEAKGYKEVKKDLIIKLPKYSLFELENGRKRMLASAGELQKGNELALPSKYVNFLYLASHYEKLKGSPEDNEQKQLFVEQHKHYLDEIIEQISEFSKRVILADANLDKVLSAYNKHRDKPIREQAENIIHLFTLTNLGAPAAFKYFDTTIDRKRYTSTKEVLDATLIHQSITGLYETRIDLSQLGGDSGGSTNLSDIIEKETGKQLVIQESILMLPEEVEEVIGNKPESDILVHTAYDESTDENVMLLTSDAPEYKPWALVIQDSNGENKIKMLSGGSPKKKRKV

SEQ ID NO: 595 - DNA, 246 bp, synthetic construct
  misc_feature 1..246: note = Synthetic Polynucleotide
  source 1..246: mol_type = other DNA
gcggacatggaggacgtgcgcggccgcctggtgcagtaccgcggcgaggtgcaggccatgctcggccagagcaccgaggagctgcgggtgcgcctcgcctcccacctgcgcaagctgcgtaagcggctcctccgcgatgccgatgacctgcagaagcgcctggcagtgtaccaggccggggcccgcgagggcgccgagcgcggcctcagcgccatccgcgagcgcctggggcccctggtggaacag

SEQ ID NO: 596 - skipped

SEQ ID NO: 597 - DNA, 21 bp, synthetic construct
  misc_feature 1..21: note = Synthetic Polynucleotide
  source 1..21: mol_type = other DNA
ggsggsggsggsggsggsggs

SEQ ID NO: 598 - protein, 36 aa, synthetic construct
  REGION 1..36: note = Synthetic Polypeptide
  VARIANT 2: note = Xaa can be any naturally occurring amino acid
  VARIANT 4..26: note = Xaa can be any naturally occurring amino acid
  VARIANT 27..29: note = Xaa may be absent
  VARIANT 32..33: note = Xaa can be any naturally occurring amino acid
  VARIANT 34..35: note = Xaa may be absent
HXEXXXXXXXXXXXXXXXXXXXXXXXXXXPCXXXXC

SEQ ID NO: 599 - protein, 11 aa, synthetic construct
  REGION 1..11: note = Synthetic Polypeptide
SPKKKRKVEAS

SEQ ID NO: 600 - protein, 84 aa, synthetic construct
  REGION 1..84: note = Synthetic Polypeptide
MTNLSDIIEKETGKQLVIQESILMLPEEVEEVIGNKPESDILVHTAYDESTDENVMLLTSDAPEYKPWALVIQDSNGENKIKML

SEQ ID NO: 601 - RNA, 82 nt, synthetic construct
  misc_feature 1..82: note = Synthetic Polynucleotide
  source 1..82: mol_type = other RNA
gttttagagctagaaatagcaagttaaaataaaggctagtccgttatcaacttgaaaaagtggcaccgagtcggtgcttttt

SEQ ID NO: 602-606 - skipped (5 entries)

SEQ ID NO: 607 - protein, 200 aa, Homo sapiens
MDSLLMNRRKFLYQFKNVRWAKGRRETYLCYVVKRRDSATSFSLDFGYLRNKNGCHVELLFLRYISDWDLDPGRCYRVTWFTSWSPCYDCARHVADFLRGNPYLSLRIFTARLYFCEDRKAEPEGLRRLHRAGVQIAIMTFKDYFYCWNTFVENHERTFKAWEGLHENSVRLSRQLRRILLPLYEVDDLRDAFRTLGLLD

SEQ ID NO: 608 - protein, 181 aa, Homo sapiens
MDSLLMNRRKFLYQFKNVRWAKGRRETYLCYVVKRRDSATSFSLDFGYLRNKNGCHVELLFLRYISDWDLDPGRCYRVTWFTSWSPCYDCARHVADFLRGNPNLSLRIFTARLYFCEDRKAEPEGLRRLHRAGVQIAIMTFKDYFYCWNTFVENHERTFKAWEGLHENSVRLSRQLRRILL

SEQ ID NO: 609 - protein, 208 aa, Petromyzon marinus
MTDAEYVRIHEKLDIYTFKKQFFNNKKSVSHRCYVLFELKRRGERRACFWGYAVNKPQSGTERGIHAEIFSIRKVEEYLRDNPGQFTINWYSSWSPCADCAEKILEWYNQELRGNGHTLKIWACKLYYEKNARNQIGLWNLRDNGVGLNVMVSEHYQCCRKIFIQSSHNQLNENRWLEKTLKRAEKRRSELSIMIQVKILHTTKSPAV

SEQ ID NO: 610 - protein, 325 aa, Homo sapiens
MELKYHPEMRFFHWFSKWRKLHRDQEYEVTWYISWSPCTKCTRDMATFLAEDPKVTLTIFVARLYYFWDPDYQEALRSLCQKRDGPRATMKIMNYDEFQHCWSKFVYSQRELFEPWNNLPKYYILLHIMLGEILRHSMDPPTFTFNFNNEPWVRGRHETYLCYEVERMHNDTWVLLNQRRGFLCNQAPHKHGFLEGRHAELCFLDVIPFWKLDLDQDYRVTCFTSWSPCFSCAQEMAKFISKNKHVSLCIFTARIYDDQGRCQEGLRTLAEAGAKISIMTYSEFKHCWDTFVDHQGCPFQPWDGLDEHSQDLSGRLRAILQNQEN

SEQ ID NO: 611 - protein, 1599 aa, synthetic construct
  REGION 1..1599: note = Synthetic Polypeptide
MSSETGPVAVDPTLRRRIEPHEFEVFFDPRELRKETCLLYEINWGGRHSIWRHTSQNTNKHVEVNFIEKFTTERYFCPNTRCSITWFLSWSPCGECSRAITEFLSRYPHVTLFIYIARLYHHADPRNRQGLRDLISSGVTIQIMTEQESGYCWRNFVNYSPSNEAHWPRYPHLWVRLYVLELYCIILGLPPCLNILRRKQPQLTFFTIALQSCHYQRLPPHILWATGLKGGSDKKYSIGLAIGTNSVGWAVITDEYKVPSKKFKVLGNTDRHSIKKNLIGALLFDSGETAEATRLKRTARRRYTRRKNRICYLQEIFSNEMAKVDDSFFHRLEESFLVEEDKKHERHPIFGNIVDEVAYHEKYPTIYHLRKKLVDSTDKADLRLIYLALAHMIKFRGHFLIEGDLNPDNSDVDKLFIQLVQTYNQLFEENPINASGVDAKAILSARLSKSRRLENLIAQLPGEKKNGLFGNLIALSLGLTPNFKSNFDLAEDAKLQLSKDTYDDDLDNLLAQIGDQYADLFLAAKNLSDAILLSDILRVNTEITKAPLSASMIKRYDEHHQDLTLLKALVRQQLPEKYKEIFFDQSKNGYAGYIDGGASQEEFYKFIKPILEKMDGTEELLVKLNREDLLRKQRTFDNGSIPHQIHLGELHAILRRQEDFYPFLKDNREKIEKILTFRIPYYVGPLARGNSRFAWMTRKSEETITPWNFEEVVDKGASAQSFIERMTNFDKNLPNEKVLPKHSLLYEYFTVYNELTKVKYVTEGMRKPAFLSGEQKKAIVDLLFKTNRKVTVKQLKEDYFKKIECFDSVEISGVEDRFNASLGTYHDLLKIIKDKDFLDNEENEDILEDIVLTLTLFEDREMIEERLKTYAHLFDDKVMKQLKRRRYTGWGRLSRKLINGIRDKQSGKTILDFLKSDGFANRNFMQLIHDDSLTFKEDIQKAQVSGQGDSLHEHIANLAGSPAIKKGILQTVKVVDELVKVMGRHKPENIVIEMARENQTTQKGQKNSRERMKRIEEGIKELGSQILKEHPVENTQLQNEKLYLYYLQNGRDMYVDQELDINRLSDYDVDAIVPQSFLKDDSIDNKVLTRSDKNRGKSDNVPSEEVVKKMKNYWRQLLNAKLITQRKFDNLTKAERGGLSELDKAGFIKRQLVETRQITKHVAQILDSRMNTKYDENDKLIREVKVITLKSKLVSDFRKDFQFYKVREINNYHHAHDAYLNAVVGTALIKKYPKLESEFVYGDYKVYDVRKMIAKSEQEIGKATAKYFFYSNIMNFFKTEITLANGEIRKRPLIETNGETGEIVWDKGRDFATVRKVLSMPQVNIVKKTEVQTGGFSKESILPKRNSDKLIARKKDWDPKKYGGFDSPTVAYSVLVVAKVEKGKSKKLKSVKELLGITIMERSSFEKNPIDFLEAKGYKEVKKDLIIKLPKYSLFELENGRKRMLASAGELQKGNELALPSKYVNFLYLASHYEKLKGSPEDNEQKQLFVEQHKHYLDEIIEQISEFSKRVILADANLDKVLSAYNKHRDKPIREQAENIIHLFTLTNLGAPAAFKYFDTTIDRKRYTSTKEVLDATLIHQSITGLYETRIDLSQLGGD

SEQ ID NO: 612 - protein, 1606 aa, synthetic construct
  REGION 1..1606: note = Synthetic Polypeptide
MSSETGPVAVDPTLRRRIEPHEFEVFFDPRELRKETCLLYEINWGGRHSIWRHTSQNTNKHVEVNFIEKFTTERYFCPNTRCSITWFLSWSPCGECSRAITEFLSRYPHVTLFIYIARLYHHADPRNRQGLRDLISSGVTIQIMTEQESGYCWRNFVNYSPSNEAHWPRYPHLWVRLYVLELYCIILGLPPCLNILRRKQPQLTFFTIALQSCHYQRLPPHILWATGLKGGSGGSGGSMDKKYSIGLAIGTNSVGWAVITDEYKVPSKKFKVLGNTDRHSIKKNLIGALLFDSGETAEATRLKRTARRRYTRRKNRICYLQEIFSNEMAKVDDSFFHRLEESFLVEEDKKHERHPIFGNIVDEVAYHEKYPTIYHLRKKLVDSTDKADLRLIYLALAHMIKFRGHFLIEGDLNPDNSDVDKLFIQLVQTYNQLFEENPINASGVDAKAILSARLSKSRRLENLIAQLPGEKKNGLFGNLIALSLGLTPNFKSNFDLAEDAKLQLSKDTYDDDLDNLLAQIGDQYADLFLAAKNLSDAILLSDILRVNTEITKAPLSASMIKRYDEHHQDLTLLKALVRQQLPEKYKEIFFDQSKNGYAGYIDGGASQEEFYKFIKPILEKMDGTEELLVKLNREDLLRKQRTFDNGSIPHQIHLGELHAILRRQEDFYPFLKDNREKIEKILTFRIPYYVGPLARGNSRFAWMTRKSEETITPWNFEEVVDKGASAQSFIERMTNFDKNLPNEKVLPKHSLLYEYFTVYNELTKVKYVTEGMRKPAFLSGEQKKAIVDLLFKTNRKVTVKQLKEDYFKKIECFDSVEISGVEDRFNASLGTYHDLLKIIKDKDFLDNEENEDILEDIVLTLTLFEDREMIEERLKTYAHLFDDKVMKQLKRRRYTGWGRLSRKLINGIRDKQSGKTILDFLKSDGFANRNFMQLIHDDSLTFKEDIQKAQVSGQGDSLHEHIANLAGSPAIKKGILQTVKVVDELVKVMGRHKPENIVIEMARENQTTQKGQKNSRERMKRIEEGIKELGSQILKEHPVENTQLQNEKLYLYYLQNGRDMYVDQELDINRLSDYDVDAIVPQSFLKDDSIDNKVLTRSDKNRGKSDNVPSEEVVKKMKNYWRQLLNAKLITQRKFDNLTKAERGGLSELDKAGFIKRQLVETRQITKHVAQILDSRMNTKYDENDKLIREVKVITLKSKLVSDFRKDFQFYKVREINNYHHAHDAYLNAVVGTALIKKYPKLESEFVYGDYKVYDVRKMIAKSEQEIGKATAKYFFYSNIMNFFKTEITLANGEIRKRPLIETNGETGEIVWDKGRDFATVRKVLSMPQVNIVKKTEVQTGGFSKESILPKRNSDKLIARKKDWDPKKYGGFDSPTVAYSVLVVAKVEKGKSKKLKSVKELLGITIMERSSFEKNPIDFLEAKGYKEVKKDLIIKLPKYSLFELENGRKRMLASAGELQKGNELALPSKYVNFLYLASHYEKLKGSPEDNEQKQLFVEQHKHYLDEIIEQISEFSKRVILADANLDKVLSAYNKHRDKPIREQAENIIHLFTLTNLGAPAAFKYFDTTIDRKRYTSTKEVLDATLIHQSITGLYETRIDLSQLGGD

SEQ ID NO: 613 - protein, 1599 aa, synthetic construct
  REGION 1..1599: note = Synthetic Polypeptide
DKKYSIGLAIGTNSVGWAVITDEYKVPSKKFKVLGNTDRHSIKKNLIGALLFDSGETAEATRLKRTARRRYTRRKNRICYLQEIFSNEMAKVDDSFFHRLEESFLVEEDKKHERHPIFGNIVDEVAYHEKYPTIYHLRKKLVDSTDKADLRLIYLALAHMIKFRGHFLIEGDLNPDNSDVDKLFIQLVQTYNQLFEENPINASGVDAKAILSARLSKSRRLENLIAQLPGEKKNGLFGNLIALSLGLTPNFKSNFDLAEDAKLQLSKDTYDDDLDNLLAQIGDQYADLFLAAKNLSDAILLSDILRVNTEITKAPLSASMIKRYDEHHQDLTLLKALVRQQLPEKYKEIFFDQSKNGYAGYIDGGASQEEFYKFIKPILEKMDGTEELLVKLNREDLLRKQRTFDNGSIPHQIHLGELHAILRRQEDFYPFLKDNREKIEKILTFRIPYYVGPLARGNSRFAWMTRKSEETITPWNFEEVVDKGASAQSFIERMTNFDKNLPNEKVLPKHSLLYEYFTVYNELTKVKYVTEGMRKPAFLSGEQKKAIVDLLFKTNRKVTVKQLKEDYFKKIECFDSVEISGVEDRFNASLGTYHDLLKIIKDKDFLDNEENEDILEDIVLTLTLFEDREMIEERLKTYAHLFDDKVMKQLKRRRYTGWGRLSRKLINGIRDKQSGKTILDFLKSDGFANRNFMQLIHDDSLTFKEDIQKAQVSGQGDSLHEHIANLAGSPAIKKGILQTVKVVDELVKVMGRHKPENIVIEMARENQTTQKGQKNSRERMKRIEEGIKELGSQILKEHPVENTQLQNEKLYLYYLQNGRDMYVDQELDINRLSDYDVDAIVPQSFLKDDSIDNKVLTRSDKNRGKSDNVPSEEVVKKMKNYWRQLLNAKLITQRKFDNLTKAERGGLSELDKAGFIKRQLVETRQITKHVAQILDSRMNTKYDENDKLIREVKVITLKSKLVSDFRKDFQFYKVREINNYHHAHDAYLNAVVGTALIKKYPKLESEFVYGDYKVYDVRKMIAKSEQEIGKATAKYFFYSNIMNFFKTEITLANGEIRKRPLIETNGETGEIVWDKGRDFATVRKVLSMPQVNIVKKTEVQTGGFSKESILPKRNSDKLIARKKDWDPKKYGGFDSPTVAYSVLVVAKVEKGKSKKLKSVKELLGITIMERSSFEKNPIDFLEAKGYKEVKKDLIIKLPKYSLFELENGRKRMLASAGELQKGNELALPSKYVNFLYLASHYEKLKGSPEDNEQKQLFVEQHKHYLDEIIEQISEFSKRVILADANLDKVLSAYNKHRDKPIREQAENIIHLFTLTNLGAPAAFKYFDTTIDRKRYTSTKEVLDATLIHQSITGLYETRIDLSQLGGDGGSMSSETGPVAVDPTLRRRIEPHEFEVFFDPRELRKETCLLYEINWGGRHSIWRHTSQNTNKHVEVNFIEKFTTERYFCPNTRCSITWFLSWSPCGECSRAITEFLSRYPHVTLFIYIARLYHHADPRNRQGLRDLISSGVTIQIMTEQESGYCWRNFVNYSPSNEAHWPRYPHLWVRLYVLELYCIILGLPPCLNILRRKQPQLTFFTIALQSCHYQRLPPHILWATGLK

SEQ ID NO: 614 - protein, 1605 aa, synthetic construct
  REGION 1..1605: note = Synthetic Polypeptide
DKKYSIGLAIGTNSVGWAVITDEYKVPSKKFKVLGNTDRHSIKKNLIGALLFDSGETAEATRLKRTARRRYTRRKNRICYLQEIFSNEMAKVDDSFFHRLEESFLVEEDKKHERHPIFGNIVDEVAYHEKYPTIYHLRKKLVDSTDKADLRLIYLALAHMIKFRGHFLIEGDLNPDNSDVDKLFIQLVQTYNQLFEENPINASGVDAKAILSARLSKSRRLENLIAQLPGEKKNGLFGNLIALSLGLTPNFKSNFDLAEDAKLQLSKDTYDDDLDNLLAQIGDQYADLFLAAKNLSDAILLSDILRVNTEITKAPLSASMIKRYDEHHQDLTLLKALVRQQLPEKYKEIFFDQSKNGYAGYIDGGASQEEFYKFIKPILEKMDGTEELLVKLNREDLLRKQRTFDNGSIPHQIHLGELHAILRRQEDFYPFLKDNREKIEKILTFRIPYYVGPLARGNSRFAWMTRKSEETITPWNFEEVVDKGASAQSFIERMTNFDKNLPNEKVLPKHSLLYEYFTVYNELTKVKYVTEGMRKPAFLSGEQKKAIVDLLFKTNRKVTVKQLKEDYFKKIECFDSVEISGVEDRFNASLGTYHDLLKIIKDKDFLDNEENEDILEDIVLTLTLFEDREMIEERLKTYAHLFDDKVMKQLKRRRYTGWGRLSRKLINGIRDKQSGKTILDFLKSDGFANRNFMQLIHDDSLTFKEDIQKAQVSGQGDSLHEHIANLAGSPAIKKGILQTVKVVDELVKVMGRHKPENIVIEMARENQTTQKGQKNSRERMKRIEEGIKELGSQILKEHPVENTQLQNEKLYLYYLQNGRDMYVDQELDINRLSDYDVDAIVPQSFLKDDSIDNKVLTRSDKNRGKSDNVPSEEVVKKMKNYWRQLLNAKLITQRKFDNLTKAERGGLSELDKAGFIKRQLVETRQITKHVAQILDSRMNTKYDENDKLIREVKVITLKSKLVSDFRKDFQFYKVREINNYHHAHDAYLNAVVGTALIKKYPKLESEFVYGDYKVYDVRKMIAKSEQEIGKATAKYFFYSNIMNFFKTEITLANGEIRKRPLIETNGETGEIVWDKGRDFATVRKVLSMPQVNIVKKTEVQTGGFSKESILPKRNSDKLIARKKDWDPKKYGGFDSPTVAYSVLVVAKVEKGKSKKLKSVKELLGITIMERSSFEKNPIDFLEAKGYKEVKKDLIIKLPKYSLFELENGRKRMLASAGELQKGNELALPSKYVNFLYLASHYEKLKGSPEDNEQKQLFVEQHKHYLDEIIEQISEFSKRVILADANLDKVLSAYNKHRDKPIREQAENIIHLFTLTNLGAPAAFKYFDTTIDRKRYTSTKEVLDATLIHQSITGLYETRIDLSQLGGDGGSGGSGGSMSSETGPVAVDPTLRRRIEPHEFEVFFDPRELRKETCLLYEINWGGRHSIWRHTSQNTNKHVEVNFIEKFTTERYFCPNTRCSITWFLSWSPCGECSRAITEFLSRYPHVTLFIYIARLYHHADPRNRQGLRDLISSGVTIQIMTEQESGYCWRNFVNYSPSNEAHWPRYPHLWVRLYVLELYCIILGLPPCLNILRRKQPQLTFFTIALQSCHYQRLPPHILWATGLK

SEQ ID NO: 615 - protein, 1612 aa, synthetic construct
  REGION 1..1612: note = Synthetic Polypeptide
MSSETGPVAVDPTLRRRIEPHEFEVFFDPRELRKETCLLYEINWGGRHSIWRHTSQNTNKHVEVNFIEKFTTERYFCPNTRCSITWFLSWSPCGECSRAITEFLSRYPHVTLFIYIARLYHHADPRNRQGLRDLISSGVTIQIMTEQESGYCWRNFVNYSPSNEAHWPRYPHLWVRLYVLELYCIILGLPPCLNILRRKQPQLTFFTIALQSCHYQRLPPHILWATGLKSGSETPGTSESATPESDKKYSIGLAIGTNSVGWAVITDEYKVPSKKFKVLGNTDRHSIKKNLIGALLFDSGETAEATRLKRTARRRYTRRKNRICYLQEIFSNEMAKVDDSFFHRLEESFLVEEDKKHERHPIFGNIVDEVAYHEKYPTIYHLRKKLVDSTDKADLRLIYLALAHMIKFRGHFLIEGDLNPDNSDVDKLFIQLVQTYNQLFEENPINASGVDAKAILSARLSKSRRLENLIAQLPGEKKNGLFGNLIALSLGLTPNFKSNFDLAEDAKLQLSKDTYDDDLDNLLAQIGDQYADLFLAAKNLSDAILLSDILRVNTEITKAPLSASMIKRYDEHHQDLTLLKALVRQQLPEKYKEIFFDQSKNGYAGYIDGGASQEEFYKFIKPILEKMDGTEELLVKLNREDLLRKQRTFDNGSIPHQIHLGELHAILRRQEDFYPFLKDNREKIEKILTFRIPYYVGPLARGNSRFAWMTRKSEETITPWNFEEVVDKGASAQSFIERMTNFDKNLPNEKVLPKHSLLYEYFTVYNELTKVKYVTEGMRKPAFLSGEQKKAIVDLLFKTNRKVTVKQLKEDYFKKIECFDSVEISGVEDRFNASLGTYHDLLKIIKDKDFLDNEENEDILEDIVLTLTLFEDREMIEERLKTYAHLFDDKVMKQLKRRRYTGWGRLSRKLINGIRDKQSGKTILDFLKSDGFANRNFMQLIHDDSLTFKEDIQKAQVSGQGDSLHEHIANLAGSPAIKKGILQTVKVVDELVKVMGRHKPENIVIEMARENQTTQKGQKNSRERMKRIEEGIKELGSQILKEHPVENTQLQNEKLYLYYLQNGRDMYVDQELDINRLSDYDVDAIVPQSFLKDDSIDNKVLTRSDKNRGKSDNVPSEEVVKKMKNYWRQLLNAKLITQRKFDNLTKAERGGLSELDKAGFIKRQLVETRQITKHVAQILDSRMNTKYDENDKLIREVKVITLKSKLVSDFRKDFQFYKVREINNYHHAHDAYLNAVVGTALIKKYPKLESEFVYGDYKVYDVRKMIAKSEQEIGKATAKYFFYSNIMNFFKTEITLANGEIRKRPLIETNGETGEIVWDKGRDFATVRKVLSMPQVNIVKKTEVQTGGFSKESILPKRNSDKLIARKKDWDPKKYGGFDSPTVAYSVLVVAKVEKGKSKKLKSVKELLGITIMERSSFEKNPIDFLEAKGYKEVKKDLIIKLPKYSLFELENGRKRMLASAGELQKGNELALPSKYVNFLYLASHYEKLKGSPEDNEQKQLFVEQHKHYLDEIIEQISEFSKRVILADANLDKVLSAYNKHRDKPIREQAENIIHLFTLTNLGAPAAFKYFDTTIDRKRYTSTKEVLDATLIHQSITGLYETRIDLSQLGGD

SEQ ID NO: 616 - DNA, 80 bp, synthetic construct
  misc_feature 1..80: note = Synthetic Polynucleotide
  source 1..80: mol_type = other DNA
gtaggtagttaggatgaatggaaggttggtatagtcccgcggatttatttatttaatggatgacctctggatccatggac

SEQ ID NO: 617 - DNA, 80 bp, synthetic construct
  misc_feature 1..80: note = Synthetic Polynucleotide
  source 1..80: mol_type = other DNA
gtaggtagttaggatgaatggaaggttggtatagcttccgcggatttatttatttatggatgacctctggatccatggac

SEQ ID NO: 618 - DNA, 80 bp, synthetic construct
  misc_feature 1..80: note = Synthetic Polynucleotide
  source 1..80: mol_type = other DNA
gtaggtagttaggatgaatggaaggttggtatagccttccgcggatttatttattatggatgacctctggatccatggac

SEQ ID NO: 619 - DNA, 80 bp, synthetic construct
  misc_feature 1..80: note = Synthetic Polynucleotide
  source 1..80: mol_type = other DNA
gtaggtagttaggatgaatggaaggttggtatagccattccgcggatttatttatttggatgacctctggatccatggac

SEQ ID NO: 620 - DNA, 80 bp, synthetic construct
  misc_feature 1..80: note = Synthetic Polynucleotide
  source 1..80: mol_type = other DNA
gtaggtagttaggatgaatggaaggttggtatagcctattccgcggatttatttattggatgacctctggatccatggac

SEQ ID NO: 621 - DNA, 80 bp, synthetic construct
  misc_feature 1..80: note = Synthetic Polynucleotide
  source 1..80: mol_type = other DNA
gtaggtagttaggatgaatggaaggttggtatagccttattccgcggatttatttatggatgacctctggatccatggac

SEQ ID NO: 622 - DNA, 80 bp, synthetic construct
  misc_feature 1..80: note = Synthetic Polynucleotide
  source 1..80: mol_type = other DNA
gtaggtagttaggatgaatggaaggttggtatagccattattccgcggatttattttggatgacctctggatccatggac

SEQ ID NO: 623 - DNA, 80 bp, synthetic construct
  misc_feature 1..80: note = Synthetic Polynucleotide
  source 1..80: mol_type = other DNA
gtaggtagttaggatgaatggaaggttggtatagcctattattccgcggatttatttggatgacctctggatccatggac

SEQ ID NO: 624 - DNA, 80 bp, synthetic construct
  misc_feature 1..80: note = Synthetic Polynucleotide
  source 1..80: mol_type = other DNA
gtaggtagttaggatgaatggaaggttggtatagccattatattccgcggatttattggatgacctctggatccatggac

SEQ ID NO: 625 - DNA, 80 bp, synthetic construct
  misc_feature 1..80: note = Synthetic Polynucleotide
  source 1..80: mol_type = other DNA
gtaggtagttaggatgaatggaaggttggtatagcctattatattccgcggatttatggatgacctctggatccatggac

SEQ ID NO: 626 - DNA, 80 bp, synthetic construct
  misc_feature 1..80: note = Synthetic Polynucleotide
  source 1..80: mol_type = other DNA
gtaggtagttaggatgaatggaaggttggtatagccttattatattccgcggattttggatgacctctggatccatggac

SEQ ID NO: 627 - DNA, 80 bp, synthetic construct
  misc_feature 1..80: note = Synthetic Polynucleotide
  source 1..80: mol_type = other DNA
gtaggtagttaggatgaatggaaggttggtatagccattattatattccgcggatttggatgacctctggatccatggac

SEQ ID NO: 628 - DNA, 80 bp, synthetic construct
  misc_feature 1..80: note = Synthetic Polynucleotide
  source 1..80: mol_type = other DNA
gtaggtagttaggatgaatggaaggttggtatagcctattattatattccgcggattggatgacctctggatccatggac

SEQ ID NO: 629 - DNA, 80 bp, synthetic construct
  misc_feature 1..80: note = Synthetic Polynucleotide
  source 1..80: mol_type = other DNA
gtaggtagttaggatgaatggaaggttggtatagccattattattattaccgcggatggatgacctctggatccatggac

SEQ ID NO: 630 - DNA, 80 bp, synthetic construct
  misc_feature 1..80: note = Synthetic Polynucleotide
  source 1..80: mol_type = other DNA
gtaggtagttaggatgaatggaaggttggtatagccattattattattattaccgctggatgacctctggatccatggac

SEQ ID NO: 631 - DNA, 80 bp, synthetic construct
  misc_feature 1..80: note = Synthetic Polynucleotide
  source 1..80: mol_type = other DNA
gtaggtagttaggatgaatggaaggttggtatagtaatattaatttatttatttaatggatgacctctggatccatggac

SEQ ID NO: 632 - DNA, 80 bp, synthetic construct; identical to SEQ ID NO: 383
  misc_feature 1..80: note = Synthetic Polynucleotide
  source 1..80: mol_type = other DNA
  modified_base 44: mod_base = OTHER; note = uracil

SEQ ID NO: 633 - DNA, 80 bp, synthetic construct; identical to SEQ ID NO: 622
  misc_feature 1..80: note = Synthetic Polynucleotide
  source 1..80: mol_type = other DNA

SEQ ID NO: 634 - RNA, 33 nt, synthetic construct
  misc_feature 1..33: note = Synthetic Polynucleotide
  source 1..33: mol_type = other RNA
attattccgcggatttatttgttttagagctag

SEQ ID NO: 635 - RNA, 33 nt, synthetic construct
  misc_feature 1..33: note = Synthetic Polynucleotide
  source 1..33: mol_type = other RNA
cgtaggccagggtggtcacggttttagagctag

SEQ ID NO: 636 - DNA, 80 bp, synthetic construct
  misc_feature 1..80: note = Synthetic Polynucleotide
  source 1..80: mol_type = other DNA
gtaggtagttaggatgaatggaaggttggtaactatgctgccgcccagtgggactttggaaatacaatgtgtcaactctt

SEQ ID NO: 637 - DNA, 80 bp, synthetic construct
  misc_feature 1..80: note = Synthetic Polynucleotide
  source 1..80: mol_type = other DNA
gtaggtagttaggatgaatggaaggttggtaaaatacaatgtgtcaactcttgacagggctctattttataggcttcttc

SEQ ID NO: 638 - DNA, 80 bp, synthetic construct
  misc_feature 1..80: note = Synthetic Polynucleotide
  source 1..80: mol_type = other DNA
gtaggtagttaggatgaatggaaggttggtattttccatacagtcagtatcaattctggaagaatttccagacattaaag

SEQ ID NO: 639 - DNA, 80 bp, synthetic construct
  misc_feature 1..80: note = Synthetic Polynucleotide
  source 1..80: mol_type = other DNA
gtaggtagttaggatgaatggaaggttggtagcttcggtgtcgaaatgagaagaagaggcacagggctgtgaggcttatc

SEQ ID NO: 640 - DNA, 80 bp, synthetic construct
  misc_feature 1..80: note = Synthetic Polynucleotide
  source 1..80: mol_type = other DNA
gtaggtagttaggatgaatggaaggttggtagtgagcccagaaggggacagtaagaaggaaaaacaggtcagagatggcc

SEQ ID NO: 641 - DNA, 80 bp, synthetic construct
  misc_feature 1..80: note = Synthetic Polynucleotide
  source 1..80: mol_type = other DNA
gtaggtagttaggatgaatggaaggttggtatcctgaacaccttccaggaattctttggcctgaataattgcagtagctc

SEQ ID NO: 642 - DNA, 80 bp, synthetic construct
  misc_feature 1..80: note = Synthetic Polynucleotide
  source 1..80: mol_type = other DNA
gtaggtagttaggatgaatggaaggttggtagacatggaggacgtgcgcggccgcctggtgcagtaccgcggcgaggtgc

SEQ ID NO: 643 - DNA, 80 bp, synthetic construct
  misc_feature 1..80: note = Synthetic Polynucleotide
  source 1..80: mol_type = other DNA
gtaggtagttaggatgaatggaaggttggtactgcagaagcgcctggcagtgtaccaggccggggcccgcgagggcgccg

SEQ ID NO: 644 - DNA, 80 bp, synthetic construct
  misc_feature 1..80: note = Synthetic Polynucleotide
  source 1..80: mol_type = other DNA
gtaggtagttaggatgaatggaaggttggtagccgacaagcagaagaacggcatcaaggtgaacttcaagatccgccaca

SEQ ID NO: 645 - DNA, 80 bp, synthetic construct
  misc_feature 1..80: note = Synthetic Polynucleotide
  source 1..80: mol_type = other DNA
gtaggtagttaggatgaatggaaggttggtaaccactaccagcagaacacccccatcggcgacggccccgtgctgctgcc

SEQ ID NO: 646 - DNA, 81 bp, synthetic construct
  misc_feature 1..81: note = Synthetic Polynucleotide
  source 1..81: mol_type = other DNA
gtaggtagttaggatgaatggaaggttggtacctcgcccttgctcaccatctcgagtcggccgccagtgtgatggatatct

SEQ ID NO: 647 - DNA, 79 bp, synthetic construct
  misc_feature 1..79: note = Synthetic Polynucleotide
  source 1..79: mol_type = other DNA
gtaggtagttaggatgaatggaaggttggtacacgcgtaggccagggtggtcacgagggtgggccagggcacgggcagc

SEQ ID NO: 648 - DNA, 80 bp, synthetic construct
  misc_feature 1..80: note = Synthetic Polynucleotide
  source 1..80: mol_type = other DNA
gtaggtagttaggatgaatggaaggttggtaaagcactgcactccgcaggtcagggtggtcacgagggttggccagggca

SEQ ID NO: 649 - DNA, 80 bp, synthetic construct
  misc_feature 1..80: note = Synthetic Polynucleotide
  source 1..80: mol_type = other DNA
gtaggtagttaggatgaatggaaggttggtacactccgcaggtcagggtggtcacgagggttggccagggcacgggcagg

SEQ ID NO: 650 - DNA, 80 bp, synthetic construct
  misc_feature 1..80: note = Synthetic Polynucleotide
  source 1..80: mol_type = other DNA
gtaggtagttaggatgaatggaaggttggtaggatctcttcttcacggttgcctactggttcaattacttttaaaaatgg

SEQ ID NO: 651 - DNA, 80 bp, synthetic construct
  misc_feature 1..80: note = Synthetic Polynucleotide
  source 1..80: mol_type = other DNA
gtaggtagttaggatgaatggaaggttggtattctcgattgaggatctcttcttcacggttgcctactggttcaattact

SEQ ID NO: 652 - DNA, 80 bp, synthetic construct
  misc_feature 1..80: note = Synthetic Polynucleotide
  source 1..80: mol_type = other DNA
gtaggtagttaggatgaatggaaggttggtaaggagctgtggcagtggcaccagaatggattccagagtccaggtaagac

SEQ ID NO: 653 - DNA, 80 bp, synthetic construct
  misc_feature 1..80: note = Synthetic Polynucleotide
  source 1..80: mol_type = other DNA
gtaggtagttaggatgaatggaaggttggtagtactcctcccggccggcggtatccaggatgtccaacaggcacgtctcc

SEQ ID NO: 654 - DNA, 80 bp, synthetic construct
  misc_feature 1..80: note = Synthetic Polynucleotide
  source 1..80: mol_type = other DNA
gtaggtagttaggatgaatggaaggttggtatgactgcttgcagatggccatggcgcggacgcgggtgccgggcgggggt

SEQ ID NO: 655 - DNA, 80 bp, synthetic construct
  misc_feature 1..80: note = Synthetic Polynucleotide
  source 1..80: mol_type = other DNA
gtaggtagttaggatgaatggaaggttggtactgttacacatgcagttgtagtggatggtggtacagtcagagccaacct

SEQ ID NO: 656 - DNA, 80 bp, synthetic construct
  misc_feature 1..80: note = Synthetic Polynucleotide
  source 1..80: mol_type = other DNA
gtaggtagttaggatgaatggaaggttggtaggaactgtcacacatgtagttgtagtggatggtggtacagtcagagcca

SEQ ID NO: 657 - protein, 1623 aa, synthetic construct
  REGION 1..1623: note = Synthetic Polypeptide
MSSETGPVAVDPTLRRRIEPHEFEVFFDPRELRKETCLLYEINWGGRHSIWRHTSQNTNKHVEVNFIEKFTTERYFCPNTRCSITWFLSWSPCGECSRAITEFLSRYPHVTLFIYIARLYHHADPRNRQGLRDLISSGVTIQIMTEQESGYCWRNFVNYSPSNEAHWPRYPHLWVRLYVLELYCIILGLPPCLNILRRKQPQLTFFTIALQSCHYQRLPPHILWATGLKSGSETPGTSESATPESDKKYSIGLAIGTNSVGWAVITDEYKVPSKKFKVLGNTDRHSIKKNLIGALLFDSGETAEATRLKRTARRRYTRRKNRICYLQEIFSNEMAKVDDSFFHRLEESFLVEEDKKHERHPIFGNIVDEVAYHEKYPTIYHLRKKLVDSTDKADLRLIYLALAHMIKFRGHFLIEGDLNPDNSDVDKLFIQLVQTYNQLFEENPINASGVDAKAILSARLSKSRRLENLIAQLPGEKKNGLFGNLIALSLGLTPNFKSNFDLAEDAKLQLSKDTYDDDLDNLLAQIGDQYADLFLAAKNLSDAILLSDILRVNTEITKAPLSASMIKRYDEHHQDLTLLKALVRQQLPEKYKEIFFDQSKNGYAGYIDGGASQEEFYKFIKPILEKMDGTEELLVKLNREDLLRKQRTFDNGSIPHQIHLGELHAILRRQEDFYPFLKDNREKIEKILTFRIPYYVGPLARGNSRFAWMTRKSEETITPWNFEEVVDKGASAQSFIERMTNFDKNLPNEKVLPKHSLLYEYFTVYNELTKVKYVTEGMRKPAFLSGEQKKAIVDLLFKTNRKVTVKQLKEDYFKKIECFDSVEISGVEDRFNASLGTYHDLLKIIKDKDFLDNEENEDILEDIVLTLTLFEDREMIEERLKTYAHLFDDKVMKQLKRRRYTGWGRLSRKLINGIRDKQSGKTILDFLKSDGFANRNFMQLIHDDSLTFKEDIQKAQVSGQGDSLHEHIANLAGSPAIKKGILQTVKVVDELVKVMGRHKPENIVIEMARENQTTQKGQKNSRERMKRIEEGIKELGSQILKEHPVENTQLQNEKLYLYYLQNGRDMYVDQELDINRLSDYDVDAIVPQSFLKDDSIDNKVLTRSDKNRGKSDNVPSEEVVKKMKNYWRQLLNAKLITQRKFDNLTKAERGGLSELDKAGFIKRQLVETRQITKHVAQILDSRMNTKYDENDKLIREVKVITLKSKLVSDFRKDFQFYKVREINNYHHAHDAYLNAVVGTALIKKYPKLESEFVYGDYKVYDVRKMIAKSEQEIGKATAKYFFYSNIMNFFKTEITLANGEIRKRPLIETNGETGEIVWDKGRDFATVRKVLSMPQVNIVKKTEVQTGGFSKESILPKRNSDKLIARKKDWDPKKYGGFDSPTVAYSVLVVAKVEKGKSKKLKSVKELLGITIMERSSFEKNPIDFLEAKGYKEVKKDLIIKLPKYSLFELENGRKRMLASAGELQKGNELALPSKYVNFLYLASHYEKLKGSPEDNEQKQLFVEQHKHYLDEIIEQISEFSKRVILADANLDKVLSAYNKHRDKPIREQAENIIHLFTLTNLGAPAAFKYFDTTIDRKRYTSTKEVLDATLIHQSITGLYETRIDLSQLGGDSGGSPKKKRKV

SEQ ID NO: 658 - protein, 1710 aa, synthetic construct
  REGION 1..1710: note = Synthetic Polypeptide
MSSETGPVAVDPTLRRRIEPHEFEVFFDPRELRKETCLLYEINWGGRHSIWRHTSQNTNKHVEVNFIEKFTTERYFCPNTRCSITWFLSWSPCGECSRAITEFLSRYPHVTLFIYIARLYHHADPRNRQGLRDLISSGVTIQIMTEQESGYCWRNFVNYSPSNEAHWPRYPHLWVRLYVLELYCIILGLPPCLNILRRKQPQLTFFTIALQSCHYQRLPPHILWATGLKSGSETPGTSESATPESDKKYSIGLAIGTNSVGWAVITDEYKVPSKKFKVLGNTDRHSIKKNLIGALLFDSGETAEATRLKRTARRRYTRRKNRICYLQEIFSNEMAKVDDSFFHRLEESFLVEEDKKHERHPIFGNIVDEVAYHEKYPTIYHLRKKLVDSTDKADLRLIYLALAHMIKFRGHFLIEGDLNPDNSDVDKLFIQLVQTYNQLFEENPINASGVDAKAILSARLSKSRRLENLIAQLPGEKKNGLFGNLIALSLGLTPNFKSNFDLAEDAKLQLSKDTYDDDLDNLLAQIGDQYADLFLAAKNLSDAILLSDILRVNTEITKAPLSASMIKRYDEHHQDLTLLKALVRQQLPEKYKEIFFDQSKNGYAGYIDGGASQEEFYKFIKPILEKMDGTEELLVKLNREDLLRKQRTFDNGSIPHQIHLGELHAILRRQEDFYPFLKDNREKIEKILTFRIPYYVGPLARGNSRFAWMTRKSEETITPWNFEEVVDKGASAQSFIERMTNFDKNLPNEKVLPKHSLLYEYFTVYNELTKVKYVTEGMRKPAFLSGEQKKAIVDLLFKTNRKVTVKQLKEDYFKKIECFDSVEISGVEDRFNASLGTYHDLLKIIKDKDFLDNEENEDILEDIVLTLTLFEDREMIEERLKTYAHLFDDKVMKQLKRRRYTGWGRLSRKLINGIRDKQSGKTILDFLKSDGFANRNFMQLIHDDSLTFKEDIQKAQVSGQGDSLHEHIANLAGSPAIKKGILQTVKVVDELVKVMGRHKPENIVIEMARENQTTQKGQKNSRERMKRIEEGIKELGSQILKEHPVENTQLQNEKLYLYYLQNGRDMYVDQELDINRLSDYDVDAIVPQSFLKDDSIDNKVLTRSDKNRGKSDNVPSEEVVKKMKNYWRQLLNAKLITQRKFDNLTKAERGGLSELDKAGFIKRQLVETRQITKHVAQILDSRMNTKYDENDKLIREVKVITLKSKLVSDFRKDFQFYKVREINNYHHAHDAYLNAVVGTALIKKYPKLESEFVYGDYKVYDVRKMIAKSEQEIGKATAKYFFYSNIMNFFKTEITLANGEIRKRPLIETNGETGEIVWDKGRDFATVRKVLSMPQVNIVKKTEVQTGGFSKESILPKRNSDKLIARKKDWDPKKYGGFDSPTVAYSVLVVAKVEKGKSKKLKSVKELLGITIMERSSFEKNPIDFLEAKGYKEVKKDLIIKLPKYSLFELENGRKRMLASAGELQKGNELALPSKYVNFLYLASHYEKLKGSPEDNEQKQLFVEQHKHYLDEIIEQISEFSKRVILADANLDKVLSAYNKHRDKPIREQAENIIHLFTLTNLGAPAAFKYFDTTIDRKRYTSTKEVLDATLIHQSITGLYETRIDLSQLGGDSGGSTNLSDIIEKETGKQLVIQESILMLPEEVEEVIGNKPESDILVHTAYDESTDENVMLLTSDAPEYKPWALVIQDSNGENKIKMLSGGSPKKKRKV

SEQ ID NO: 659 - DNA, 23 bp, synthetic construct
  misc_feature 1..23: note = Synthetic Polynucleotide
  source 1..23: mol_type = other DNA
cacccagactgagcacgtgctgg

SEQ ID NO: 660 - DNA, 23 bp, synthetic construct
  misc_feature 1..23: note = Synthetic Polynucleotide
  source 1..23: mol_type = other DNA
gacacagactgggcacgtgaggg

SEQ ID NO: 661 - DNA, 23 bp, synthetic construct
  misc_feature 1..23: note = Synthetic Polynucleotide
  source 1..23: mol_type = other DNA
agctcagactgagcaagtgaggg

SEQ ID NO: 662 - DNA, 23 bp, synthetic construct
  misc_feature 1..23: note = Synthetic Polynucleotide
  source 1..23: mol_type = other DNA
agaccagactgagcaagagaggg

SEQ ID NO: 663 - DNA, 23 bp, synthetic construct
  misc_feature 1..23: note = Synthetic Polynucleotide
  source 1..23: mol_type = other DNA
gagccagaatgagcacgtgaggg

SEQ ID NO: 664 - DNA, 23 bp, synthetic construct
  misc_feature 1..23: note = Synthetic Polynucleotide
  source 1..23: mol_type = other DNA
tgcactgcggccggaggaggtgg

SEQ ID NO: 665 - DNA, 23 bp, synthetic construct
  misc_feature 1..23: note = Synthetic Polynucleotide
  source 1..23: mol_type = other DNA
ggctctgcggctggagggggtgg

SEQ ID NO: 666 - DNA, 23 bp, synthetic construct
  misc_feature 1..23: note = Synthetic Polynucleotide
  source 1..23: mol_type = other DNA
ggcacgacggctggaggtggggg

SEQ ID NO: 667 - DNA, 23 bp, synthetic construct
  misc_feature 1..23: note = Synthetic Polynucleotide
  source 1..23: mol_type = other DNA
ggcatcacggctggaggtggagg

SEQ ID NO: 668 - DNA, 23 bp, synthetic construct
  misc_feature 1..23: note = Synthetic Polynucleotide
  source 1..23: mol_type = other DNA
ggcgctgcggcgggaggtggagg

SEQ ID NO: 669 - DNA, 23 bp, synthetic construct
  misc_feature 1..23: note = Synthetic Polynucleotide
  source 1..23: mol_type = other DNA
ggcactgagactgggggtggggg

SEQ ID NO: 670 - DNA, 23 bp, synthetic construct
  misc_feature 1..23: note = Synthetic Polynucleotide
  source 1..23: mol_type = other DNA
agcagtgcggctagaggtggtgg

SEQ ID NO: 671 - DNA, 23 bp, synthetic construct
  misc_feature 1..23: note = Synthetic Polynucleotide
  source 1..23: mol_type = other DNA
ggcactgctactgggggtggtgg

SEQ ID NO: 672 - DNA, 23 bp, synthetic construct
  misc_feature 1..23: note = Synthetic Polynucleotide
  source 1..23: mol_type = other DNA
ggcactggggctgggggaggggg

SEQ ID NO: 673 - DNA, 23 bp, synthetic construct
  misc_feature 1..23: note = Synthetic Polynucleotide
  source 1..23: mol_type = other DNA
ggcactggggttggaggtggggg

SEQ ID NO: 674 - protein, 1368 aa, synthetic construct; identical to SEQ ID NO: 4
  REGION 1..1368: note = Synthetic Polypeptide

SEQ ID NO: 675 - protein, 7 aa, synthetic construct
  REGION 1..7: note = Synthetic Polypeptide
KRLAVYQ

SEQ ID NO: 676-677 - skipped (2 entries)

SEQ ID NO: 678 - protein, 7 aa, synthetic construct
  REGION 1..7: note = Synthetic Polypeptide
RAMAICK

SEQ ID NO: 679-683 - skipped (5 entries)

SEQ ID NO: 684 - DNA, 23 bp, synthetic construct
  misc_feature 1..23: note = Synthetic Polynucleotide
  source 1..23: mol_type = other DNA
tcagggtgagcatagactgccgg

SEQ ID NO: 685 - DNA, 23 bp, synthetic construct
  misc_feature 1..23: note = Synthetic Polynucleotide
  source 1..23: mol_type = other DNA
gaatcgggaggggagactgcggg

SEQ ID NO: 686 - DNA, 23 bp, synthetic construct
  misc_feature 1..23: note = Synthetic Polynucleotide
  source 1..23: mol_type = other DNA
tgaagtgttgcatagactgcagg

SEQ ID NO: 687 - DNA, 23 bp, synthetic construct
  misc_feature 1..23: note = Synthetic Polynucleotide
  source 1..23: mol_type = other DNA
ggagagagagcatagactgctgg

SEQ ID NO: 688 - DNA, 23 bp, synthetic construct
  misc_feature 1..23: note = Synthetic Polynucleotide
  source 1..23: mol_type = other DNA
ccaaacaaaacatagactgctgg

SEQ ID NO: 689-694 - skipped (6 entries)

SEQ ID NO: 695 - DNA, 23 bp, synthetic construct
  misc_feature 1..23: note = Synthetic Polynucleotide
  source 1..23: mol_type = other DNA
caggaagctggagcacgtgaggg

SEQ ID NO: 696 - DNA, 23 bp, synthetic construct
  misc_feature 1..23: note = Synthetic Polynucleotide
  source 1..23: mol_type = other DNA
aaggctgagggagcacgtgaagg

SEQ ID NO: 697 - DNA, 23 bp, synthetic construct
  misc_feature 1..23: note = Synthetic Polynucleotide
  source 1..23: mol_type = other DNA
gtcaggggaagagcacgtgacgg

SEQ ID NO: 698 - DNA, 23 bp, synthetic construct
  misc_feature 1..23: note = Synthetic Polynucleotide
  source 1..23: mol_type = other DNA
gttgtgaactgagcacgtgaggg

SEQ ID NO: 699 - DNA, 23 bp, synthetic construct
  misc_feature 1..23: note = Synthetic Polynucleotide
  source 1..23: mol_type = other DNA
atatttgctggagcacgtgaagg

SEQ ID NO: 700-712 - skipped (13 entries)

SEQ ID NO: 713 - DNA, 25 bp, synthetic construct
  misc_feature 1..25: note = Synthetic Polynucleotide
  source 1..25: mol_type = other DNA
cacctgcgcaagctgcgtaagcggc

SEQ ID NO: 714 - DNA, 25 bp, synthetic construct
  misc_feature 1..25: note = Synthetic Polynucleotide
  source 1..25: mol_type = other DNA
tcctccgcgatgccgatgacctgca

SEQ ID NO: 715 - DNA, 25 bp, synthetic construct
  misc_feature 1..25: note = Synthetic Polynucleotide
  source 1..25: mol_type = other DNA
aggccggggcccgcgagggcgccga

SEQ ID NO: 716 - DNA, 25 bp, synthetic construct
  misc_feature 1..25: note = Synthetic Polynucleotide
  source 1..25: mol_type = other DNA
gcgcggcctcagcgccatccgcgag

SEQ ID NO: 717 - DNA, 25 bp, synthetic construct
  misc_feature 1..25: note = Synthetic Polynucleotide
  source 1..25: mol_type = other DNA
cctgtgcagctgtgggttgattcca

SEQ ID NO: 718 - DNA, 25 bp, synthetic construct
  misc_feature 1..25: note = Synthetic Polynucleotide
  source 1..25: mol_type = other DNA
cacccccgcccggcacccgcgtccg

SEQ ID NO: 719 - DNA, 25 bp, synthetic construct
  misc_feature 1..25: note = Synthetic Polynucleotide
  source 1..25: mol_type = other DNA
agtcacagcacatgacggaggttgt

SEQ ID NO: 720 - DNA, 25 bp, synthetic construct
  misc_feature 1..25: note = Synthetic Polynucleotide
  source 1..25: mol_type = other DNA
gaggcgctgcccccaccatgagcgc

SEQ ID NO: 721-740 - skipped (20 entries)

SEQ ID NO: 741 - protein, 7 aa, synthetic construct
  REGION 1..7: note = Synthetic Polypeptide
PKKKRKV

SEQ ID NO: 742 - protein, 30 aa, synthetic construct
  REGION 1..30: note = Synthetic Polypeptide
MDSLLMNRRKFLYQFKNVRWAKGRRETYLC

SEQ ID NO: 743 - DNA, 200 bp, synthetic construct
  misc_feature 1..200: note = Synthetic Polynucleotide
  source 1..200: mol_type = other DNA
agcaccgaggagctgcgggtgcgcctcgcctcccacctgcgcaagctgcgtaagcggctcctccgcgatgccgatgacctgcagaagtgcctggcagtgtaccaggccggggcccgcgagggcgccgagcgcggcctcagcgccatccgcgagcgcctggggcccctggtggaacagggccgcgtgcgggccgccactgt

SEQ ID NO: 744 - DNA, 200 bp, synthetic construct
  misc_feature 1..200: note = Synthetic Polynucleotide
  source 1..200: mol_type = other DNA
acagtggcggcccgcacgcggccctgttccaccaggggccccaggcgctcgcggatggcgctgaggccgcgctcggcgccctcgcgggccccggcctggtacactgccaggcacttctgcaggtcatcggcatcgcggaggagccgcttacgcagcttgcgcaggtgggaggcgaggcgcacccgcagctcctcggtgct

SEQ ID NO: 745 - DNA, 200 bp, synthetic construct
  misc_feature 1..200: note = Synthetic Polynucleotide
  source 1..200: mol_type = other DNA
actcccctgccctcaacaagatgttttgccaactggccaagacctgccctgtgcagctgtgggttgattccacacccccgcccggcacccgcgtccgcgccatggccatctacaagcagtcacagcacatgacggaggttgtgaggcgctgcccccaccatgagcgctgctcagatagcgatggtgagcagctggggctg

SEQ ID NO: 746 - DNA, 200 bp, synthetic construct
  misc_feature 1..200: note = Synthetic Polynucleotide
  source 1..200: mol_type = other DNA
cagccccagctgctcaccatcgctatctgagcagcgctcatggtgggggcagcgcctcacaacctccgtcatgtgctgtgactgcttgtagatggccatggcgcggacgcgggtgccgggcgggggtgtggaatcaacccacagctgcacagggcaggtcttggccagttggcaaaacatcttgttgagggcaggggagt

SEQ ID NO: 747 - DNA, 23 bp, synthetic construct
  misc_feature 1..23: note = Synthetic Polynucleotide
  source 1..23: mol_type = other DNA
tttytttttttttttttttgagg

SEQ ID NO: 748 - DNA, 23 bp, synthetic construct
  misc_feature 1..23: note = Synthetic Polynucleotide
  source 1..23: mol_type = other DNA
tttgyggtggagaggggcttcgg

SEQ ID NO: 749 - DNA, 23 bp, synthetic construct
  misc_feature 1..23: note = Synthetic Polynucleotide
  source 1..23: mol_type = other DNA
ttgyggtggagaggggcttcggg

SEQ ID NO: 750 - DNA, 23 bp, synthetic construct
  misc_feature 1..23: note = Synthetic Polynucleotide
  source 1..23: mol_type = other DNA
ttgytaataaaagttagaaacgg

SEQ ID NO: 751 - DNA, 23 bp, synthetic construct
  misc_feature 1..23: note = Synthetic Polynucleotide
  source 1..23: mol_type = other DNA
ttgayagggagcaagcagttcgg

SEQ ID NO: 752 - DNA, 23 bp, synthetic construct
  misc_feature 1..23: note = Synthetic Polynucleotide
  source 1..23: mol_type = other DNA
tgayagggagcaagcagttcggg

SEQ ID NO: 753 - DNA, 23 bp, synthetic construct
  misc_feature 1..23: note = Synthetic Polynucleotide
  source 1..23: mol_type = other DNA
ttcygtaaaacataaaagtcagg

SEQ ID NO: 754 - DNA, 23 bp, synthetic construct
  misc_feature 1..23: note = Synthetic Polynucleotide
  source 1..23: mol_type = other DNA
ttcyggtttgtcttatattctgg

SEQ ID NO: 755 - DNA, 23 bp, synthetic construct
  misc_feature 1..23: note = Synthetic Polynucleotide
  source 1..23: mol_type = other DNA
cttcyatgatcttcgaggagagg

SEQ ID NO: 756 - DNA, 23 bp, synthetic construct
  misc_feature 1..23: note = Synthetic Polynucleotide
  source 1..23: mol_type = other DNA
ttcgtggyggaagctcctcacgg

SEQ ID NO: 757 - DNA, 23 bp, synthetic construct
  misc_feature 1..23: note = Synthetic Polynucleotide
  source 1..23: mol_type = other DNA
cttcaytgtggtcattttcctgg

SEQ ID NO: 758 - DNA, 23 bp, synthetic construct
  misc_feature 1..23: note = Synthetic Polynucleotide
  source 1..23: mol_type = other DNA
ttcaytgtggtcattttcctggg

SEQ ID NO: 759 - DNA, 23 bp, synthetic construct
  misc_feature 1..23: note = Synthetic Polynucleotide
  source 1..23: mol_type = other DNA
ttcagygtattgctttgaggagg

SEQ ID NO: 760 - DNA, 23 bp, synthetic construct
  misc_feature 1..23: note = Synthetic Polynucleotide
  source 1..23: mol_type = other DNA
ttaagttytatgcgattaccggg

SEQ ID NO: 761 - DNA, 23 bp, synthetic construct
  misc_feature 1..23: note = Synthetic Polynucleotide
  source 1..23: mol_type = other DNA
tgtgttygcgcagggagctcggg

SEQ ID NO: 762 - DNA, 23 bp, synthetic construct
  misc_feature 1..23: note = Synthetic Polynucleotide
  source 1..23: mol_type = other DNA
atgtgttygcgcagggagctcgg

SEQ ID NO: 763 - DNA, 23 bp, synthetic construct
  misc_feature 1..23: note = Synthetic Polynucleotide
  source 1..23: mol_type = other DNA
tgtggyggccatggcctatgagg

SEQ ID NO: 764 - DNA, 23 bp, synthetic construct
  misc_feature 1..23: note = Synthetic Polynucleotide
  source 1..23: mol_type = other DNA
tgtgayggacagagcacaaatgg

SEQ ID NO: 765 - DNA, 23 bp, synthetic construct
  misc_feature 1..23: note = Synthetic Polynucleotide
  source 1..23: mol_type = other DNA
tgtagyaggtgaagatgatcagg

SEQ ID NO: 766 - DNA, 23 bp, synthetic construct
  misc_feature 1..23: note = Synthetic Polynucleotide
  source 1..23: mol_type = other DNA
tgtaatayttctgatcatgttgg

SEQ ID NO: 767 - DNA, 23 bp, synthetic construct
  misc_feature 1..23: note = Synthetic Polynucleotide
  source 1..23: mol_type = other DNA
tggyagaggcccctggggtcagg

SEQ ID NO: 768 - DNA, 23 bp, synthetic construct
  misc_feature 1..23: note = Synthetic Polynucleotide
  source 1..23: mol_type = other DNA
tggyaagttctcccctcaacagg

SEQ ID NO: 769 - DNA, 23 bp, synthetic construct
  misc_feature 1..23: note = Synthetic Polynucleotide
  source 1..23: mol_type = other DNA
tggttyggcatcatagtgctggg

SEQ ID NO: 770 - DNA, 23 bp, synthetic construct
  misc_feature 1..23: note = Synthetic Polynucleotide
  source 1..23: mol_type = other DNA
gtggttyggcatcatagtgctgg

SEQ ID NO: 771 - DNA, 23 bp, synthetic construct
  misc_feature 1..23: note = Synthetic Polynucleotide
  source 1..23: mol_type = other DNA
tggggaayatacgtgcttggcgg

SEQ ID NO: 772 - DNA, 23 bp, synthetic construct
  misc_feature 1..23: note = Synthetic Polynucleotide
  source 1..23: mol_type = other DNA
ggggaayatacgtgcttggcggg

SEQ ID NO: 773 - DNA, 23 bp, synthetic construct
  misc_feature 1..23: note = Synthetic Polynucleotide
  source 1..23: mol_type = other DNA
gagtygcaccaaaatttttgggg

SEQ ID NO: 774 - DNA, 23 bp, synthetic construct
  misc_feature 1..23: note = Synthetic Polynucleotide
  source 1..23: mol_type = other DNA
ggagtygcaccaaaatttttggg

SEQ ID NO: 775 - DNA, 23 bp, synthetic construct
  misc_feature 1..23: note = Synthetic Polynucleotide
  source 1..23: mol_type = other DNA
tggagtygcaccaaaatttttgg

SEQ ID NO: 776 - DNA, 23 bp, synthetic construct
  misc_feature 1..23: note = Synthetic Polynucleotide
  source 1..23: mol_type = other DNA
tggaagytatcgatgaccacagg

SEQ ID NO: 777 - DNA, 23 bp, synthetic construct
  misc_feature 1..23: note = Synthetic Polynucleotide
  source 1..23: mol_type = other DNA
tgcyggtggccgacgtgaagcgg

SEQ ID NO: 778 - DNA, 23 bp, synthetic construct
  misc_feature 1..23: note = Synthetic Polynucleotide
  source 1..23: mol_type = other DNA
tgcyaaaagacccaaaacaaagg

SEQ ID NO: 779 - DNA, 23 bp, synthetic construct
  misc_feature 1..23: note = Synthetic Polynucleotide
  source 1..23: mol_type = other DNA
tgctygatccactggatgtgggg

SEQ ID NO: 780 - DNA, 23 bp, synthetic construct
  misc_feature 1..23: note = Synthetic Polynucleotide
  source 1..23: mol_type = other DNA
gtgctygatccactggatgtggg

SEQ ID NO: 781 - DNA, 23 bp, synthetic construct
  misc_feature 1..23: note = Synthetic Polynucleotide
  source 1..23: mol_type = other DNA
cgtgctygatccactggatgtgg

SEQ ID NO: 782 - DNA, 23 bp, synthetic construct
  misc_feature 1..23: note = Synthetic Polynucleotide
  source 1..23: mol_type = other DNA
tgctgaytggaaaccgtgagtgg

SEQ ID NO: 783 - DNA, 23 bp, synthetic construct
  misc_feature 1..23: note = Synthetic Polynucleotide
  source 1..23: mol_type = other DNA
gtgcggyatttgtcctgctccgg

SEQ ID NO: 784 - DNA, 23 bp, synthetic construct
  misc_feature 1..23: note = Synthetic Polynucleotide
  source 1..23: mol_type = other DNA
tgcggyatttgtcctgctccggg

SEQ ID NO: 785 - DNA, 23 bp, synthetic construct
  misc_feature 1..23: note = Synthetic Polynucleotide
  source 1..23: mol_type = other DNA
tgcggagyggacgggcagcgtgg

SEQ ID NO: 786 - DNA, 23 bp, synthetic construct
  misc_feature 1..23: note = Synthetic Polynucleotide
  source 1..23: mol_type = other DNA
gcgaytgcagaagatgacctggg

SEQ ID NO: 787 - DNA, 23 bp, synthetic construct
  misc_feature 1..23: note = Synthetic Polynucleotide
  source 1..23: mol_type = other DNA
tgcgaytgcagaagatgacctgg

SEQ ID NO: 788 - DNA, 23 bp, synthetic construct
  misc_feature 1..23: note = Synthetic Polynucleotide
  source 1..23: mol_type = other DNA
gcayggtctctcgggcgctgggg

SEQ ID NO: 789 - DNA, 23 bp, synthetic construct
  misc_feature 1..23: note = Synthetic Polynucleotide
  source 1..23: mol_type = other DNA
tgcayggtctctcgggcgctggg

SEQ ID NO: 790 - DNA, 23 bp, synthetic construct
  misc_feature 1..23: note = Synthetic Polynucleotide
  source 1..23: mol_type = other DNA
ctgcayggtctctcgggcgctgg

SEQ ID NO: 791 - DNA, 23 bp, synthetic construct
  misc_feature 1..23: note = Synthetic Polynucleotide
  source 1..23: mol_type = other DNA
tgcagyagccgcccttctgccgg

SEQ ID NO: 792 - DNA, 23 bp, synthetic construct
  misc_feature 1..23: note = Synthetic Polynucleotide
  source 1..23: mol_type = other DNA
tgayggaggggatggcgcctagg

SEQ ID NO: 793 - DNA, 23 bp, synthetic construct
  misc_feature 1..23: note = Synthetic Polynucleotide
  source 1..23: mol_type = other DNA
tgatgygaggctgccgccgcagg

SEQ ID NO: 794 - DNA, 23 bp, synthetic construct
  misc_feature 1..23: note = Synthetic Polynucleotide
  source 1..23: mol_type = other DNA
tgagyatgcataagcgacgaagg

SEQ ID NO: 795 - DNA, 23 bp, synthetic construct
  misc_feature 1..23: note = Synthetic Polynucleotide
  source 1..23: mol_type = other DNA
tgagtytgagagccggctggcgg

SEQ ID NO: 796 - DNA, 23 bp, synthetic construct
  misc_feature 1..23: note = Synthetic Polynucleotide
  source 1..23: mol_type = other DNA
tgagtaygcataagcgacgaagg

SEQ ID NO: 797 - DNA, 23 bp, synthetic construct
  misc_feature 1..23: note = Synthetic Polynucleotide
  source 1..23: mol_type = other DNA
tgaggyaatcagccaggatctgg

SEQ ID NO: 798 - DNA, 23 bp, synthetic construct
  misc_feature 1..23: note = Synthetic Polynucleotide
  source 1..23: mol_type = other DNA
tgagayggcccacctgggcttgg

SEQ ID NO: 799 - DNA, 23 bp, synthetic construct
  misc_feature 1..23: note = Synthetic Polynucleotide
  source 1..23: mol_type = other DNA
gagayggcccacctgggcttggg

SEQ ID NO: 800 - DNA, 23 bp, synthetic construct
  misc_feature 1..23: note = Synthetic Polynucleotide
  source 1..23: mol_type = other DNA
tctyggagggcgaggaggagagg

SEQ ID NO: 801 - DNA, 23 bp, synthetic construct
  misc_feature 1..23: note = Synthetic Polynucleotide
  source 1..23: mol_type = other DNA
tctygatggccacgtcgtactgg

SEQ ID NO: 802 - DNA, 23 bp, synthetic construct
  misc_feature 1..23: note = Synthetic Polynucleotide
  source 1..23: mol_type = other DNA
tctttaytgtttaagccaacagg

SEQ ID NO: 803 - DNA, 23 bp, synthetic construct
  misc_feature 1..23: note = Synthetic Polynucleotide
  source 1..23: mol_type = other DNA
tctgyggaccaaaatcattctgg

SEQ ID NO: 804 - DNA, 23 bp, synthetic construct
  misc_feature 1..23: note = Synthetic Polynucleotide
  source 1..23: mol_type = other DNA
tctggytgatactcaagtccagg

SEQ ID NO: 805 - DNA, 23 bp, synthetic construct
  misc_feature 1..23: note = Synthetic Polynucleotide
  source 1..23: mol_type = other DNA
tccyagtaagaaacagaatatgg

SEQ ID NO: 806 - DNA, 23 bp, synthetic construct
  misc_feature 1..23: note = Synthetic Polynucleotide
  source 1..23: mol_type = other DNA
tccyaaaaggcacgggatgaagg

SEQ ID NO: 807 - DNA, 23 bp, synthetic construct
  misc_feature 1..23: note = Synthetic Polynucleotide
  source 1..23: mol_type = other DNA
tccaytgtggcccaggaaggagg

SEQ ID NO: 808 - DNA, 23 bp, synthetic construct
  misc_feature 1..23: note = Synthetic Polynucleotide
  source 1..23: mol_type = other DNA
cgctccaytgtggcccaggaagg

SEQ ID NO: 809 - DNA, 23 bp, synthetic construct
  misc_feature 1..23: note = Synthetic Polynucleotide
  source 1..23: mol_type = other DNA
tccayggtcaagtcagcctcagg

SEQ ID NO: 810 - DNA, 23 bp, synthetic construct
  misc_feature 1..23: note = Synthetic Polynucleotide
  source 1..23: mol_type = other DNA
ccayggtcaagtcagcctcaggg

SEQ ID NO: 811 - DNA, 23 bp, synthetic construct
  misc_feature 1..23: note = Synthetic Polynucleotide
  source 1..23: mol_type = other DNA
ctccayggagttccctggcctgg

SEQ ID NO: 812 - DNA, 23 bp, synthetic construct
  misc_feature 1..23: note = Synthetic Polynucleotide
  source 1..23: mol_type = other DNA
tccayggagttccctggcctggg

SEQ ID NO: 813 - DNA, 23 bp, synthetic construct
  misc_feature 1..23: note = Synthetic Polynucleotide
  source 1..23: mol_type = other DNA
ccayggagttccctggcctgggg

SEQ ID NO: 814 - DNA, 23 bp, synthetic construct
  misc_feature 1..23: note = Synthetic Polynucleotide
  source 1..23: mol_type = other DNA
tccayagatgaagttattgcagg

SEQ ID NO: 815 - DNA, 23 bp, synthetic construct
  misc_feature 1..23: note = Synthetic Polynucleotide
  source 1..23: mol_type = other DNA
ctccagyaagttataaaatttgg

SEQ ID NO: 816 - DNA, 23 bp, synthetic construct
  misc_feature 1..23: note = Synthetic Polynucleotide
  source 1..23: mol_type = other DNA
tccagyaagttataaaatttggg

SEQ ID NO: 817 - DNA, 23 bp, synthetic construct
  misc_feature 1..23: note = Synthetic Polynucleotide
  source 1..23: mol_type = other DNA
tccaggygcgggcgtcatgctgg

SEQ ID NO: 818 - DNA, 23 bp, synthetic construct
  misc_feature 1..23: note = Synthetic Polynucleotide
  source 1..23: mol_type = other DNA
ccaggygcgggcgtcatgctggg

SEQ ID NO: 819 - DNA, 23 bp, synthetic construct
  misc_feature 1..23: note = Synthetic Polynucleotide
  source 1..23: mol_type = other DNA
tcaytgataagcagggcccaggg

SEQ ID NO: 820 - DNA, 23 bp, synthetic construct
  misc_feature 1..23: note = Synthetic Polynucleotide
  source 1..23: mol_type = other DNA
ttcaytgataagcagggcccagg

SEQ ID NO: 821 - DNA, 23 bp, synthetic construct
  misc_feature 1..23: note = Synthetic Polynucleotide
  source 1..23: mol_type = other DNA
tcayggtgagttaaggacagtgg

SEQ ID NO: 822 - DNA, 23 bp, synthetic construct
  misc_feature 1..23: note = Synthetic Polynucleotide
  source 1..23: mol_type = other DNA
tcatattyacaggcttgtaaagg

SEQ ID NO: 823 - DNA, 23 bp, synthetic construct
  misc_feature 1..23: note = Synthetic Polynucleotide
  source 1..23: mol_type = other DNA
catagtyctgcagaggagagggg

SEQ ID NO: 824 - DNA, 23 bp, synthetic construct
  misc_feature 1..23: note = Synthetic Polynucleotide
  source 1..23: mol_type = other DNA
tcatagtyctgcagaggagaggg

SEQ ID NO: 825 - DNA, 23 bp, synthetic construct
  misc_feature 1..23: note = Synthetic Polynucleotide
  source 1..23: mol_type = other DNA
tcagaagyttttttcttcgcagg

SEQ ID NO: 826 - DNA, 23 bp, synthetic construct
  misc_feature 1..23: note = Synthetic Polynucleotide
  source 1..23: mol_type = other DNA
tcaagtgygtccttccggagcgg

SEQ ID NO: 827 - DNA, 23 bp, synthetic construct
  misc_feature 1..23: note = Synthetic Polynucleotide
  source 1..23: mol_type = other DNA
caagtgygtccttccggagcggg

SEQ ID NO: 828 - DNA, 23 bp, synthetic construct
  misc_feature 1..23: note = Synthetic Polynucleotide
  source 1..23: mol_type = other DNA
aagtgygtccttccggagcgggg

SEQ ID NO: 829 - DNA, 23 bp, synthetic construct
  misc_feature 1..23: note = Synthetic Polynucleotide
  source 1..23: mol_type = other DNA
agtgygtccttccggagcggggg

SEQ ID NO: 830 - DNA, 23 bp, synthetic construct
  misc_feature 1..23: note = Synthetic Polynucleotide
  source 1..23: mol_type = other DNA
tacygtgggcagagaaggggagg

SEQ ID NO: 831 - DNA, 23 bp, synthetic construct
  misc_feature 1..23: note = Synthetic Polynucleotide
  source 1..23: mol_type = other DNA
aggtacygtgggcagagaagggg

SEQ ID NO: 832 - DNA, 23 bp, synthetic construct
  misc_feature 1..23: note = Synthetic Polynucleotide
  source 1..23: mol_type = other DNA
caggtacygtgggcagagaaggg

SEQ ID NO: 833 - DNA, 23 bp, synthetic construct
  misc_feature 1..23: note = Synthetic Polynucleotide
  source 1..23: mol_type = other DNA
taaytgtgcccatggccatttgg

SEQ ID NO: 834 - DNA, 23 bp, synthetic construct
  misc_feature 1..23: note = Synthetic Polynucleotide
  source 1..23: mol_type = other DNA
taaatgaytgagtttgcccttgg

SEQ ID NO: 835 - DNA, 23 bp, synthetic construct
  misc_feature 1..23: note = Synthetic Polynucleotide
  source 1..23: mol_type = other DNA
gttataygtgccaatgtgactgg

SEQ ID NO: 836 - DNA, 23 bp, synthetic construct
  misc_feature 1..23: note = Synthetic Polynucleotide
  source 1..23: mol_type = other DNA
gtgtgtayagatgtccagaaggg

SEQ ID NO: 837 - DNA, 23 bp, synthetic construct
  misc_feature 1..23: note = Synthetic Polynucleotide
  source 1..23: mol_type = other DNA
gtcytaggccccaaaaattttgg

SEQ ID NO: 838 - DNA, 23 bp, synthetic construct
  misc_feature 1..23: note = Synthetic Polynucleotide
  source 1..23: mol_type = other DNA
gtcgagaygctggccagctacgg

SEQ ID NO: 839 - DNA, 23 bp, synthetic construct
  misc_feature 1..23: note = Synthetic Polynucleotide
  source 1..23: mol_type = other DNA
tcgagaygctggccagctacggg

SEQ ID NO: 840 - DNA, 23 bp, synthetic construct
  misc_feature 1..23: note = Synthetic Polynucleotide
  source 1..23: mol_type = other DNA
gtcaytgaggttctgcatggtgg

SEQ ID NO: 841 - DNA, 23 bp, synthetic construct
  misc_feature 1..23: note = Synthetic Polynucleotide
  source 1..23: mol_type = other DNA
gcggtcaytgaggttctgcatgg

SEQ ID NO: 842 - DNA, 23 bp, synthetic construct
  misc_feature 1..23: note = Synthetic Polynucleotide
  source 1..23: mol_type = other DNA
gtcaygaaaaagccaagatgcgg

SEQ ID NO: 843 - DNA, 23 bp, synthetic construct
  misc_feature 1..23: note = Synthetic Polynucleotide
  source 1..23: mol_type = other DNA
tcaygaaaaagccaagatgcggg

SEQ ID NO: 844 - DNA, 23 bp, synthetic construct
  misc_feature 1..23: note = Synthetic Polynucleotide
  source 1..23: mol_type = other DNA
gtcayagttctggcacgttttgg

SEQ ID NO: 845 - DNA, 23 bp, synthetic construct
  misc_feature 1..23: note = Synthetic Polynucleotide
  source 1..23: mol_type = other DNA
gtayagaggtattgttcttttgg

SEQ ID NO: 846 - DNA, 23 bp, synthetic construct
  misc_feature 1..23: note = Synthetic Polynucleotide
  source 1..23: mol_type = other DNA
gtagyaggcccaagcccgacagg

SEQ ID NO: 847 - DNA, 23 bp, synthetic construct
  misc_feature 1..23: note = Synthetic Polynucleotide
  source 1..23: mol_type = other DNA
gtaagtgytgaccaaattaccgg

SEQ ID NO: 848 - DNA, 23 bp, synthetic construct
  misc_feature 1..23: note = Synthetic Polynucleotide
  source 1..23: mol_type = other DNA
ggtygggagggaaaagacattgg

SEQ ID NO: 849 - DNA, 23 bp, synthetic construct
  misc_feature 1..23: note = Synthetic Polynucleotide
  source 1..23: mol_type = other DNA
ggttayggtgccgttaagtttgg

SEQ ID NO: 850 - DNA, 23 bp, synthetic construct
  misc_feature 1..23: note = Synthetic Polynucleotide
  source 1..23: mol_type = other DNA
ggtgttgytggaatggagaatgg

SEQ ID NO: 851 - DNA, 23 bp, synthetic construct
  misc_feature 1..23: note = Synthetic Polynucleotide
  source 1..23: mol_type = other DNA
gggattgytgttcatgaattggg

SEQ ID NO: 852 - DNA, 23 bp, synthetic construct
  misc_feature 1..23: note = Synthetic Polynucleotide
  source 1..23: mol_type = other DNA
ggcyatatacaactacgcaaagg

SEQ ID NO: 853 - DNA, 23 bp, synthetic construct
  misc_feature 1..23: note = Synthetic Polynucleotide
  source 1..23: mol_type = other DNA
gggcyagaaatctgttgctatgg

SEQ ID NO: 854 - DNA, 23 bp, synthetic construct
  misc_feature 1..23: note = Synthetic Polynucleotide
  source 1..23: mol_type = other DNA
ggcyagaaatctgttgctatggg

SEQ ID NO: 855 - DNA, 23 bp, synthetic construct
  misc_feature 1..23: note = Synthetic Polynucleotide
  source 1..23: mol_type = other DNA
ggctgytgttggccagcagaagg

SEQ ID NO: 856 - DNA, 23 bp, synthetic construct
  misc_feature 1..23: note = Synthetic Polynucleotide
  source 1..23: mol_type = other DNA
ggctgatyacctcacgctccagg

SEQ ID NO: 857 - DNA, 23 bp, synthetic construct
  misc_feature 1..23: note = Synthetic Polynucleotide
  source 1..23: mol_type = other DNA
gatyacctcacgctccaggttgg

SEQ ID NO: 858 - DNA, 23 bp, synthetic construct
  misc_feature 1..23: note = Synthetic Polynucleotide
  source 1..23: mol_type = other DNA
ggcatagyggaagatctatgagg

SEQ ID NO: 859 - DNA, 23 bp, synthetic construct
  misc_feature 1..23: note = Synthetic Polynucleotide
  source 1..23: mol_type = other DNA
ggcaagygcatcaacacgctggg

SEQ ID NO: 860 - DNA, 23 bp, synthetic construct
  misc_feature 1..23: note = Synthetic Polynucleotide
  source 1..23: mol_type = other DNA
gggcaagygcatcaacacgctgg

SEQ ID NO: 861 - DNA, 23 bp, synthetic construct
  misc_feature 1..23: note = Synthetic Polynucleotide
  source 1..23: mol_type = other DNA
ggataayatcaaacacgtcccgg

SEQ ID NO: 862 - DNA, 23 bp, synthetic construct
  misc_feature 1..23: note = Synthetic Polynucleotide
  source 1..23: mol_type = other DNA
gataayatcaaacacgtcccggg

SEQ ID NO: 863 - DNA, 23 bp, synthetic construct
  misc_feature 1..23: note = Synthetic Polynucleotide
  source 1..23: mol_type = other DNA
ggagyaggggctcagcagggcgg

SEQ ID NO: 864 - DNA, 23 bp, synthetic construct
  misc_feature 1..23: note = Synthetic Polynucleotide
  source 1..23: mol_type = other DNA
ataggagyaggggctcagcaggg

SEQ ID NO: 865 - DNA, 23 bp, synthetic construct
  misc_feature 1..23: note = Synthetic Polynucleotide
  source 1..23: mol_type = other DNA
ggaggyaataactttgtaagtgg

SEQ ID NO: 866 - DNA, 23 bp, synthetic construct
  misc_feature 1..23: note = Synthetic Polynucleotide
  source 1..23: mol_type = other DNA
ggagayggcctccatgaaggagg

SEQ ID NO: 867 - DNA, 23 bp, synthetic construct
  misc_feature 1..23: note = Synthetic Polynucleotide
  source 1..23: mol_type = other DNA
ggaagyggcgtgctgtgctgagg

SEQ ID NO: 868 - DNA, 23 bp, synthetic construct
  misc_feature 1..23: note = Synthetic Polynucleotide
  source 1..23: mol_type = other DNA
ggaagyagtggtggaagtagagg

SEQ ID NO: 869 - DNA, 23 bp, synthetic construct
  misc_feature 1..23: note = Synthetic Polynucleotide
  source 1..23: mol_type = other DNA
gcttttyttcaagctgcccaagg

SEQ ID NO: 870 - DNA, 23 bp, synthetic construct
  misc_feature 1..23: note = Synthetic Polynucleotide
  source 1..23: mol_type = other DNA
gcttgyagatggccatggcgcgg

SEQ ID NO: 871 - DNA, 23 bp, synthetic construct
  misc_feature 1..23: note = Synthetic Polynucleotide
  source 1..23: mol_type = other DNA
gctgtyggccgccggctccgcgg

SEQ ID NO: 872 - DNA, 23 bp, synthetic construct
  misc_feature 1..23: note = Synthetic Polynucleotide
  source 1..23: mol_type = other DNA
cggytggccttgggattgagggg

SEQ ID NO: 873 - DNA, 23 bp, synthetic construct
  misc_feature 1..23: note = Synthetic Polynucleotide
  source 1..23: mol_type = other DNA
gcggytggccttgggattgaggg

SEQ ID NO: 874 - DNA, 23 bp, synthetic construct
  misc_feature 1..23: note = Synthetic Polynucleotide
  source 1..23: mol_type = other DNA
cgcggytggccttgggattgagg

SEQ ID NO: 875 - DNA, 23 bp, synthetic construct
  misc_feature 1..23: note = Synthetic Polynucleotide
  source 1..23: mol_type = other DNA
gccyggggaaaaacagagtcagg

SEQ ID NO: 876 - DNA, 23 bp, synthetic construct
  misc_feature 1..23: note = Synthetic Polynucleotide
  source 1..23: mol_type = other DNA
gccygaaaacacagccacagagg

SEQ ID NO: 877 - DNA, 23 bp, synthetic construct
  misc_feature 1..23: note = Synthetic Polynucleotide
  source 1..23: mol_type = other DNA
gccgggygttggtctgtctctgg

SEQ ID NO: 878 - DNA, 23 bp, synthetic construct
  misc_feature 1..23: note = Synthetic Polynucleotide
  source 1..23: mol_type = other DNA
gccaggyggaagtcatagagcgg

SEQ ID NO: 879 - DNA, 23 bp, synthetic construct
  misc_feature 1..23: note = Synthetic Polynucleotide
  source 1..23: mol_type = other DNA
gccagayactttgtgaagtaagg

SEQ ID NO: 880 - DNA, 23 bp, synthetic construct
  misc_feature 1..23: note = Synthetic Polynucleotide
  source 1..23: mol_type = other DNA
ccagayactttgtgaagtaaggg

SEQ ID NO: 881 - DNA, 23 bp, synthetic construct
  misc_feature 1..23: note = Synthetic Polynucleotide
  source 1..23: mol_type = other DNA
gccagagygagtggctggagtgg

SEQ ID NO: 882 - DNA, 23 bp, synthetic construct
  misc_feature 1..23: note = Synthetic Polynucleotide
  source 1..23: mol_type = other DNA
gccaayggtaacgggcctttggg

SEQ ID NO: 883 - DNA, 23 bp, synthetic construct
  misc_feature 1..23: note = Synthetic Polynucleotide
  source 1..23: mol_type = other DNA
agccaayggtaacgggcctttgg

SEQ ID NO: 884 - DNA, 23 bp, synthetic construct
  misc_feature 1..23: note = Synthetic Polynucleotide
  source 1..23: mol_type = other DNA
gcatgyttgctccaacacagagg

SEQ ID NO: 885 - DNA, 23 bp, synthetic construct
  misc_feature 1..23: note = Synthetic Polynucleotide
  source 1..23: mol_type = other DNA
caagcagygtgagctgctcctgg

SEQ ID NO: 886 - DNA, 23 bp, synthetic construct
  misc_feature 1..23: note = Synthetic Polynucleotide
  source 1..23: mol_type = other DNA
gcagygtgagctgctcctggagg

SEQ ID NO: 887 - DNA, 23 bp, synthetic construct
  misc_feature 1..23: note = Synthetic Polynucleotide
  source 1..23: mol_type = other DNA
gcagtggyaggtgatgttctggg

SEQ ID NO: 888 - DNA, 23 bp, synthetic construct
  misc_feature 1..23: note = Synthetic Polynucleotide
  source 1..23: mol_type = other DNA
gcaggyagagatgaccgctgtgg

SEQ ID NO: 889 - DNA, 23 bp, synthetic construct
  misc_feature 1..23: note = Synthetic Polynucleotide
  source 1..23: mol_type = other DNA
gcaggtyaccatctcctggaggg

SEQ ID NO: 890 - DNA, 23 bp, synthetic construct
  misc_feature 1..23: note = Synthetic Polynucleotide
  source 1..23: mol_type = other DNA
tgcaggtyaccatctcctggagg

SEQ ID NO: 891 - DNA, 23 bp, synthetic construct
  misc_feature 1..23: note = Synthetic Polynucleotide
  source 1..23: mol_type = other DNA
gcaaataygctatctgtagcagg

SEQ ID NO: 892 - DNA, 23 bp, synthetic construct
  misc_feature 1..23: note = Synthetic Polynucleotide
  source 1..23: mol_type = other DNA
gattayatctgtagccttcgggg

SEQ ID NO: 893 - DNA, 23 bp, synthetic construct
  misc_feature 1..23: note = Synthetic Polynucleotide
  source 1..23: mol_type = other DNA
agattayatctgtagccttcggg

SEQ ID NO: 894 - DNA, 23 bp, synthetic construct
  misc_feature 1..23: note = Synthetic Polynucleotide
  source 1..23: mol_type = other DNA
gagattayatctgtagccttcgg

SEQ ID NO: 895 - DNA, 23 bp, synthetic construct
  misc_feature 1..23: note = Synthetic Polynucleotide
  source 1..23: mol_type = other DNA
gatggyagttaatgagctcaggg

SEQ ID NO: 896 - DNA, 23 bp, synthetic construct
  misc_feature 1..23: note = Synthetic Polynucleotide
  source 1..23: mol_type = other DNA
tgatggyagttaatgagctcagg

SEQ ID NO: 897 - DNA, 23 bp, synthetic construct
  misc_feature 1..23: note = Synthetic Polynucleotide
  source 1..23: mol_type = other DNA
gatgaggyagatgcacacaaagg

SEQ ID NO: 898 - DNA, 23 bp, synthetic construct
  misc_feature 1..23: note = Synthetic Polynucleotide
  source 1..23: mol_type = other DNA
gataggyacatatcaaaccaggg

SEQ ID NO: 899 - DNA, 23 bp, synthetic construct
  misc_feature 1..23: note = Synthetic Polynucleotide
  source 1..23: mol_type = other DNA
agataggyacatatcaaaccagg

SEQ ID NO: 900 - DNA, 23 bp, synthetic construct
  misc_feature 1..23: note = Synthetic Polynucleotide
  source 1..23: mol_type = other DNA
gagaytggaaattttggccgtgg

SEQ ID NO: 901 - DNA, 23 bp, synthetic construct
  misc_feature 1..23: note = Synthetic Polynucleotide
  source 1..23: mol_type = other DNA
gataytcacaattacaactgggg

SEQ ID NO: 902 - DNA, 23 bp, synthetic construct
  misc_feature 1..23: note = Synthetic Polynucleotide
  source 1..23: mol_type = other DNA
agataytcacaattacaactggg

SEQ ID NO: 903 - DNA, 23 bp, synthetic construct
  misc_feature 1..23: note = Synthetic Polynucleotide
  source 1..23: mol_type = other DNA
gagataytcacaattacaactgg

SEQ ID NO: 904 - DNA, 23 bp, synthetic construct
  misc_feature 1..23: note = Synthetic Polynucleotide
  source 1..23: mol_type = other DNA
gagaggygagaagagggaagcgg

SEQ ID NO: 905 - DNA, 23 bp, synthetic construct
  misc_feature 1..23: note = Synthetic Polynucleotide
  source 1..23: mol_type = other DNA
gagaagaygacccaggtgagtgg

SEQ ID NO: 906 - DNA, 23 bp, synthetic construct
  misc_feature 1..23: note = Synthetic Polynucleotide
  source 1..23: mol_type = other DNA
gacttygagttcagacatgaggg

SEQ ID NO: 907 - DNA, 23 bp, synthetic construct
  misc_feature 1..23: note = Synthetic Polynucleotide
  source 1..23: mol_type = other DNA
ggacttygagttcagacatgagg

SEQ ID NO: 908 - DNA, 23 bp, synthetic construct
  misc_feature 1..23: note = Synthetic Polynucleotide
  source 1..23: mol_type = other DNA
gacaytgatgaatgtcgctatgg

SEQ ID NO: 909 - DNA, 23 bp, synthetic construct
  misc_feature 1..23: note = Synthetic Polynucleotide
  source 1..23: mol_type = other DNA
gacayggtagatgatcagcgggg

SEQ ID NO: 910 - DNA, 23 bp, synthetic construct
  misc_feature 1..23: note = Synthetic Polynucleotide
  source 1..23: mol_type = other DNA
tgacayggtagatgatcagcggg

SEQ ID NO: 911 - DNA, 23 bp, synthetic construct
  misc_feature 1..23: note = Synthetic Polynucleotide
  source 1..23: mol_type = other DNA
atgacayggtagatgatcagcgg

SEQ ID NO: 912 - DNA, 23 bp, synthetic construct
  misc_feature 1..23: note = Synthetic Polynucleotide
  source 1..23: mol_type = other DNA
gacaygaagggagatgctgaggg

SEQ ID NO: 913 - DNA, 23 bp, synthetic construct
  misc_feature 1..23: note = Synthetic Polynucleotide
  source 1..23: mol_type = other DNA
agacaygaagggagatgctgagg

SEQ ID NO: 914 - DNA, 23 bp, synthetic construct
  misc_feature 1..23: note = Synthetic Polynucleotide
  source 1..23: mol_type = other DNA
gacatytggagggtccccgatgg

SEQ ID NO: 915 - DNA, 23 bp, synthetic construct
  misc_feature 1..23: note = Synthetic Polynucleotide
  source 1..23: mol_type = other DNA
gacagagytcctccacaacatgg

SEQ ID NO: 916 - DNA, 23 bp, synthetic construct
  misc_feature 1..23: note = Synthetic Polynucleotide
  source 1..23: mol_type = other DNA
gaayatataccaaggtatcccgg

SEQ ID NO: 917 - DNA, 23 bp, synthetic construct
  misc_feature 1..23: note = Synthetic Polynucleotide
  source 1..23: mol_type = other DNA
gaatgtaygataatgaacggagg

SEQ ID NO: 918 - DNA, 23 bp, synthetic construct
  misc_feature 1..23: note = Synthetic Polynucleotide
  source 1..23: mol_type = other DNA
gaagtaayaggtgaccccagggg

SEQ ID NO: 919 - DNA, 23 bp, synthetic construct
  misc_feature 1..23: note = Synthetic Polynucleotide
  source 1..23: mol_type = other DNA
gaaggygtggtagggaggcacgg

SEQ ID NO: 920 - DNA, 23 bp, synthetic construct
  misc_feature 1..23: note = Synthetic Polynucleotide
  source 1..23: mol_type = other DNA
aaggygtggtagggaggcacggg

SEQ ID NO: 921 - DNA, 23 bp, synthetic construct
  misc_feature 1..23: note = Synthetic Polynucleotide
  source 1..23: mol_type = other DNA
aggygtggtagggaggcacgggg

SEQ ID NO: 922 - DNA, 23 bp, synthetic construct
  misc_feature 1..23: note = Synthetic Polynucleotide
  source 1..23: mol_type = other DNA
gaaataygatggggcgctcaggg

SEQ ID NO: 923 - DNA, 23 bp, synthetic construct
  misc_feature 1..23: note = Synthetic Polynucleotide
  source 1..23: mol_type = other DNA
agaaataygatggggcgctcagg

SEQ ID NO: 924 - DNA, 23 bp, synthetic construct
  misc_feature 1..23: note = Synthetic Polynucleotide
  source 1..23: mol_type = other DNA
cttgygttatgatggattcatgg

SEQ ID NO: 925 - DNA, 23 bp, synthetic construct
  misc_feature 1..23: note = Synthetic Polynucleotide
  source 1..23: mol_type = other DNA
cttayagatctcatcaatgttgg

SEQ ID NO: 926 - DNA, 23 bp, synthetic construct
  misc_feature 1..23: note = Synthetic Polynucleotide
  source 1..23: mol_type = other DNA
cttaggyaagtaatgcaatatgg

SEQ ID NO: 927 - DNA, 23 bp, synthetic construct
  misc_feature 1..23: note = Synthetic Polynucleotide
  source 1..23: mol_type = other DNA
ctgyggatgcactggggtgcggg

SEQ ID NO: 928 - DNA, 23 bp, synthetic construct
  misc_feature 1..23: note = Synthetic Polynucleotide
  source 1..23: mol_type = other DNA
tctgyggatgcactggggtgcgg

SEQ ID NO: 929 - DNA, 23 bp, synthetic construct
  misc_feature 1..23: note = Synthetic Polynucleotide
  source 1..23: mol_type = other DNA
ctgtgyaagtaatacaactttgg

SEQ ID NO: 930 - DNA, 23 bp, synthetic construct
  misc_feature 1..23: note = Synthetic Polynucleotide
  source 1..23: mol_type = other DNA
ctgtgtgygccagggctgtgggg

SEQ ID NO: 931 - DNA, 23 bp, synthetic construct
  misc_feature 1..23: note = Synthetic Polynucleotide
  source 1..23: mol_type = other DNA
ctgtgagygtgcccaggggcggg

SEQ ID NO: 932 - DNA, 23 bp, synthetic construct
  misc_feature 1..23: note = Synthetic Polynucleotide
  source 1..23: mol_type = other DNA
tgagygtgcccaggggcgggcgg

SEQ ID NO: 933 - DNA, 23 bp, synthetic construct
  misc_feature 1..23: note = Synthetic Polynucleotide
  source 1..23: mol_type = other DNA
ctggyaaaaaacctggtttttgg

SEQ ID NO: 934 - DNA, 23 bp, synthetic construct
  misc_feature 1..23: note = Synthetic Polynucleotide
  source 1..23: mol_type = other DNA
tggyaaaaaacctggtttttggg

SEQ ID NO: 935 - DNA, 23 bp, synthetic construct
  misc_feature 1..23: note = Synthetic Polynucleotide
  source 1..23: mol_type = other DNA
tgatyttcagcctccttttgggg

SEQ ID NO: 936 - DNA, 23 bp, synthetic construct
  misc_feature 1..23: note = Synthetic Polynucleotide
  source 1..23: mol_type = other DNA
ctgatyttcagcctccttttggg

SEQ ID NO: 937 - DNA, 23 bp, synthetic construct
  misc_feature 1..23: note = Synthetic Polynucleotide
  source 1..23: mol_type = other DNA
gctgatyttcagcctccttttgg

SEQ ID NO: 938 - DNA, 23 bp, synthetic construct
  misc_feature 1..23: note = Synthetic Polynucleotide
  source 1..23: mol_type = other DNA
ctgaagytggtctgacctcaggg

SEQ ID NO: 939 - DNA, 23 bp, synthetic construct
  misc_feature 1..23: note = Synthetic Polynucleotide
  source 1..23: mol_type = other DNA
gctgaagytggtctgacctcagg

SEQ ID NO: 940 - DNA, 23 bp, synthetic construct
  misc_feature 1..23: note = Synthetic Polynucleotide
  source 1..23: mol_type = other DNA
ctcytgatgttgttgtgagctgg

SEQ ID NO: 941 - DNA, 23 bp, synthetic construct
  misc_feature 1..23: note = Synthetic Polynucleotide
  source 1..23: mol_type = other DNA
ctcyagggccgcaggttggaggg

SEQ ID NO: 942 - DNA, 23 bp, synthetic construct
  misc_feature 1..23: note = Synthetic Polynucleotide
  source 1..23: mol_type = other DNA
gctcyagggccgcaggttggagg

SEQ ID NO: 943 - DNA, 23 bp, synthetic construct
  misc_feature 1..23: note = Synthetic Polynucleotide
  source 1..23: mol_type = other DNA
ggcgctcyagggccgcaggttgg

SEQ ID NO: 944 - DNA, 23 bp, synthetic construct
  misc_feature 1..23: note = Synthetic Polynucleotide
  source 1..23: mol_type = other DNA
ctcayggttggttggcaagaagg

SEQ ID NO: 945 - DNA, 23 bp, synthetic construct
  misc_feature 1..23: note = Synthetic Polynucleotide
  source 1..23: mol_type = other DNA
ctcaygatctgggatctcagagg

SEQ ID NO: 946 - DNA, 23 bp, synthetic construct
  misc_feature 1..23: note = Synthetic Polynucleotide
  source 1..23: mol_type = other DNA
ctcayaggccattgcgaccacgg

SEQ ID NO: 947 - DNA, 23 bp, synthetic construct
  misc_feature 1..23: note = Synthetic Polynucleotide
  source 1..23: mol_type = other DNA
ctcaayagatgccatctccctgg

SEQ ID NO: 948 - DNA, 23 bp, synthetic construct
  misc_feature 1..23: note = Synthetic Polynucleotide
  source 1..23: mol_type = other DNA
ctataytgttcatcccctctggg

SEQ ID NO: 949 - DNA, 23 bp, synthetic construct
  misc_feature 1..23: note = Synthetic Polynucleotide
  source 1..23: mol_type = other DNA
actataytgttcatcccctctgg

SEQ ID NO: 950 - DNA, 23 bp, synthetic construct
  misc_feature 1..23: note = Synthetic Polynucleotide
  source 1..23: mol_type = other DNA
cgtggytggggaagggcagctgg

SEQ ID NO: 951 - DNA, 23 bp, synthetic construct
  misc_feature 1..23: note = Synthetic Polynucleotide
  source 1..23: mol_type = other DNA
cgtaataygggaaaaaggcgtgg

SEQ ID NO: 952 - DNA, 23 bp, synthetic construct
  misc_feature 1..23: note = Synthetic Polynucleotide
  source 1..23: mol_type = other DNA
aataygggaaaaaggcgtggtgg

SEQ ID NO: 953 - DNA, 23 bp, synthetic construct
  misc_feature 1..23: note = Synthetic Polynucleotide
  source 1..23: mol_type = other DNA
ataygggaaaaaggcgtggtggg

SEQ ID NO: 954 - DNA, 23 bp, synthetic construct
  misc_feature 1..23: note = Synthetic Polynucleotide
  source 1..23: mol_type = other DNA
cggytgaactctcagtcttctgg

SEQ ID NO: 955 - DNA, 23 bp, synthetic construct
  misc_feature 1..23: note = Synthetic Polynucleotide
  source 1..23: mol_type = other DNA
actgcggyatgggcggggccagg

SEQ ID NO: 956 - DNA, 23 bp, synthetic construct
  misc_feature 1..23: note = Synthetic Polynucleotide
  source 1..23: mol_type = other DNA
ctgcggyatgggcggggccaggg

SEQ ID NO: 957 - DNA, 23 bp, synthetic construct
  misc_feature 1..23: note = Synthetic Polynucleotide
  source 1..23: mol_type = other DNA
cggyatgggcggggccagggtgg

SEQ ID NO: 958 - DNA, 23 bp, synthetic construct
  misc_feature 1..23: note = Synthetic Polynucleotide
  source 1..23: mol_type = other DNA
cggtytgaagcgtgcagagatgg

SEQ ID NO: 959 - DNA, 23 bp, synthetic construct
  misc_feature 1..23: note = Synthetic Polynucleotide
  source 1..23: mol_type = other DNA
cgcyttgaaaaaaaaagaaaggg

SEQ ID NO: 960 - DNA, 23 bp, synthetic construct
  misc_feature 1..23: note = Synthetic Polynucleotide
  source 1..23: mol_type = other DNA
tcgcyttgaaaaaaaaagaaagg

SEQ ID NO: 961 - DNA, 23 bp, synthetic construct
  misc_feature 1..23: note = Synthetic Polynucleotide
  source 1..23: mol_type = other DNA
cgcygaagatgaggcagaccagg

SEQ ID NO: 962 - DNA, 23 bp, synthetic construct
  misc_feature 1..23: note = Synthetic Polynucleotide
  source 1..23: mol_type = other DNA
cgcggytgagggtgtagaagtgg

SEQ ID NO: 963 - DNA, 23 bp, synthetic construct
  misc_feature 1..23: note = Synthetic Polynucleotide
  source 1..23: mol_type = other DNA
cgcaygatccacagcaccaatgg

SEQ ID NO: 964 - DNA, 23 bp, synthetic construct
  misc_feature 1..23: note = Synthetic Polynucleotide
  source 1..23: mol_type = other DNA
cgaygttgaagagggcaggcagg

SEQ ID NO: 965 - DNA, 23 bp, synthetic construct
  misc_feature 1..23: note = Synthetic Polynucleotide
  source 1..23: mol_type = other DNA
agcccgaygttgaagagggcagg

SEQ ID NO: 966 - DNA, 23 bp, synthetic construct
  misc_feature 1..23: note = Synthetic Polynucleotide
  source 1..23: mol_type = other DNA
cgaggyggtggtggtccaagtgg

SEQ ID NO: 967 - DNA, 23 bp, synthetic construct
  misc_feature 1..23: note = Synthetic Polynucleotide
  source 1..23: mol_type = other DNA
cgaggyattgccagcagtgcagg

SEQ ID NO: 968 - DNA, 23 bp, synthetic construct
  misc_feature 1..23: note = Synthetic Polynucleotide
  source 1..23: mol_type = other DNA
cgaaaygtgtatctcctcccagg

SEQ ID NO: 969 - DNA, 23 bp, synthetic construct
  misc_feature 1..23: note = Synthetic Polynucleotide
  source 1..23: mol_type = other DNA
cgaaatgyaagtctagttagagg

SEQ ID NO: 970 - DNA, 23 bp, synthetic construct
  misc_feature 1..23: note = Synthetic Polynucleotide
  source 1..23: mol_type = other DNA
gaaatgyaagtctagttagaggg

SEQ ID NO: 971 - DNA, 23 bp, synthetic construct
  misc_feature 1..23: note = Synthetic Polynucleotide
  source 1..23: mol_type = other DNA
cctgtgygtcccccaggggcagg

SEQ ID NO: 972 - DNA, 23 bp, synthetic construct
  misc_feature 1..23: note = Synthetic Polynucleotide
  source 1..23: mol_type = other DNA
ctgtgygtcccccaggggcaggg

SEQ ID NO: 973 - DNA, 23 bp, synthetic construct
  misc_feature 1..23: note = Synthetic Polynucleotide
  source 1..23: mol_type = other DNA
tgtgygtcccccaggggcagggg

SEQ ID NO: 974 - DNA, 23 bp, synthetic construct
  misc_feature 1..23: note = Synthetic Polynucleotide
  source 1..23: mol_type = other DNA
gtgygtcccccaggggcaggggg

SEQ ID NO: 975 - DNA, 23 bp, synthetic construct
  misc_feature 1..23: note = Synthetic Polynucleotide
  source 1..23: mol_type = other DNA
cctaaaaygttggatgctgaagg

SEQ ID NO: 976 - DNA, 23 bp, synthetic construct
  misc_feature 1..23: note = Synthetic Polynucleotide
  source 1..23: mol_type = other DNA
ccggygaggccctggggcggggg

SEQ ID NO: 977 - DNA, 23 bp, synthetic construct
  misc_feature 1..23: note = Synthetic Polynucleotide
  source 1..23: mol_type = other DNA
tccggygaggccctggggcgggg

SEQ ID NO: 978 - DNA, 23 bp, synthetic construct
  misc_feature 1..23: note = Synthetic Polynucleotide
  source 1..23: mol_type = other DNA
atccggygaggccctggggcggg

SEQ ID NO: 979 - DNA, 23 bp, synthetic construct
  misc_feature 1..23: note = Synthetic Polynucleotide
  source 1..23: mol_type = other DNA
gatccggygaggccctggggcgg

SEQ ID NO: 980 - DNA, 23 bp, synthetic construct
  misc_feature 1..23: note = Synthetic Polynucleotide
  source 1..23: mol_type = other DNA
tgayccagggggtctatgggagg

SEQ ID NO: 981 - DNA, 23 bp, synthetic construct
  misc_feature 1..23: note = Synthetic Polynucleotide
  source 1..23: mol_type = other DNA
cggtgayccagggggtctatggg

SEQ ID NO: 982 - DNA, 23 bp, synthetic construct
  misc_feature 1..23: note = Synthetic Polynucleotide
  source 1..23: mol_type = other DNA
ccggtgayccagggggtctatgg

SEQ ID NO: 983 - DNA, 23 bp, synthetic construct
  misc_feature 1..23: note = Synthetic Polynucleotide
  source 1..23: mol_type = other DNA
cccygaaggtggaggatgcaggg

SEQ ID NO: 984 - DNA, 23 bp, synthetic construct
  misc_feature 1..23: note = Synthetic Polynucleotide
  source 1..23: mol_type = other DNA
gcccygaaggtggaggatgcagg

SEQ ID NO: 985 - DNA, 23 bp, synthetic construct
  misc_feature 1..23: note = Synthetic Polynucleotide
  source 1..23: mol_type = other DNA
ccctygggtgcaggtttgtgagg

SEQ ID NO: 986 - DNA, 23 bp, synthetic construct
  misc_feature 1..23: note = Synthetic Polynucleotide
  source 1..23: mol_type = other DNA
cccaygtacctgccgcgccctgg

SEQ ID NO: 987 - DNA, 23 bp, synthetic construct
  misc_feature 1..23: note = Synthetic Polynucleotide
  source 1..23: mol_type = other DNA
ccaytggtcttgagccaagtggg

SEQ ID NO: 988 - DNA, 23 bp, synthetic construct
  misc_feature 1..23: note = Synthetic Polynucleotide
  source 1..23: mol_type = other DNA
tccaytggtcttgagccaagtgg

SEQ ID NO: 989 - DNA, 23 bp, synthetic construct
  misc_feature 1..23: note = Synthetic Polynucleotide
  source 1..23: mol_type = other DNA
ccaygttgtcaatgtccagctgg

SEQ ID NO: 990 - DNA, 23 bp, synthetic construct
  misc_feature 1..23: note = Synthetic Polynucleotide
  source 1..23: mol_type = other DNA
ccaygtggaccctggtgagctgg

SEQ ID NO: 991 - DNA, 23 bp, synthetic construct
  misc_feature 1..23: note = Synthetic Polynucleotide
  source 1..23: mol_type = other DNA
tgtccaygatggcggcgcggcgg

SEQ ID NO: 992 - DNA, 23 bp, synthetic construct
  misc_feature 1..23: note = Synthetic Polynucleotide
  source 1..23: mol_type = other DNA
ccaygatggcggcgcggcggcgg

SEQ ID NO: 993 - DNA, 23 bp, synthetic construct
  misc_feature 1..23: note = Synthetic Polynucleotide
  source 1..23: mol_type = other DNA
ccayagaagcccacgatgtacgg

SEQ ID NO: 994 - DNA, 23 bp, synthetic construct
  misc_feature 1..23: note = Synthetic Polynucleotide
  source 1..23: mol_type = other DNA
ccaggyatcccgggggtaggtgg

SEQ ID NO: 995 - DNA, 23 bp, synthetic construct
  misc_feature 1..23: note = Synthetic Polynucleotide
  source 1..23: mol_type = other DNA
caggyatcccgggggtaggtggg

SEQ ID NO: 996 - DNA, 23 bp, synthetic construct
  misc_feature 1..23: note = Synthetic Polynucleotide
  source 1..23: mol_type = other DNA
ccagaytgtcagcaaacacctgg

SEQ ID NO: 997 - DNA, 23 bp, synthetic construct
  misc_feature 1..23: note = Synthetic Polynucleotide
  source 1..23: mol_type = other DNA
ccaagygagtacagcgcacctgg

SEQ ID NO: 998 - DNA, 23 bp, synthetic construct
  misc_feature 1..23: note = Synthetic Polynucleotide
  source 1..23: mol_type = other DNA
caagygagtacagcgcacctggg

SEQ ID NO: 999 - DNA, 23 bp, synthetic construct
  misc_feature 1..23: note = Synthetic Polynucleotide
  source 1..23: mol_type = other DNA
aagygagtacagcgcacctgggg

SEQ ID NO: 1000 - DNA, 23 bp, synthetic construct
  misc_feature 1..23: note = Synthetic Polynucleotide
  source 1..23: mol_type = other DNA
agaytaccaccacctggtggagg

SEQ ID NO: 1001 - DNA, 23 bp, synthetic construct
  misc_feature 1..23: note = Synthetic Polynucleotide
  source 1..23: mol_type = other DNA
ccaagaytaccaccacctggtgg

SEQ ID NO: 1002 - DNA, 23 bp, synthetic construct
  misc_feature 1..23: note = Synthetic Polynucleotide
  source 1..23: mol_type = other DNA
catgygagtgcaggcggagcagg

SEQ ID NO: 1003 - DNA, 23 bp, synthetic construct
  misc_feature 1..23: note = Synthetic Polynucleotide
  source 1..23: mol_type = other DNA
cagytgaatttgtgtgtaaacgg

SEQ ID NO: 1004 - DNA, 23 bp, synthetic construct
  misc_feature 1..23: note = Synthetic Polynucleotide
  source 1..23: mol_type = other DNA
cagyggtacagggtgaccacggg

SEQ ID NO: 1005 - DNA, 23 bp, synthetic construct
  misc_feature 1..23: note = Synthetic Polynucleotide
  source 1..23: mol_type = other DNA
ccagyggtacagggtgaccacgg

SEQ ID NO: 1006 - DNA, 23 bp, synthetic construct
  misc_feature 1..23: note = Synthetic Polynucleotide
  source 1..23: mol_type = other DNA
cagyagagcttgcggcgccgggg

SEQ ID NO: 1007 - DNA, 23 bp, synthetic construct
  misc_feature 1..23: note = Synthetic Polynucleotide
  source 1..23: mol_type = other DNA
gcagyagagcttgcggcgccggg

SEQ ID NO: 1008 - DNA, 23 bp, synthetic construct
  misc_feature 1..23: note = Synthetic Polynucleotide
  source 1..23: mol_type = other DNA
cgcagyagagcttgcggcgccgg

SEQ ID NO: 1009 - DNA, 23 bp, synthetic construct
  misc_feature 1..23: note = Synthetic Polynucleotide
  source 1..23: mol_type = other DNA
cagttagygattggcaactttgg

SEQ ID NO: 1010 - DNA, 23 bp, synthetic construct
  misc_feature 1..23: note = Synthetic Polynucleotide
  source 1..23: mol_type = other DNA
cagtggygagactcgcccgcagg

SEQ ID NO: 1011 - DNA, 23 bp, synthetic construct
  misc_feature 1..23: note = Synthetic Polynucleotide
  source 1..23: mol_type = other DNA
agtggygagactcgcccgcaggg

SEQ ID NO: 1012 - DNA, 23 bp, synthetic construct
  misc_feature 1..23: note = Synthetic Polynucleotide
  source 1..23: mol_type = other DNA
caggtggyacacgaagtcctggg

SEQ ID NO: 1013 - DNA, 23 bp, synthetic construct
  misc_feature 1..23: note = Synthetic Polynucleotide
  source 1..23: mol_type = other DNA
cagaggtyctttgacagctttgg

SEQ ID NO: 1014 - DNA, 23 bp, synthetic construct
  misc_feature 1..23: note = Synthetic Polynucleotide
  source 1..23: mol_type = other DNA
agcacytgtgaggaagttcctgg

SEQ ID NO: 1015 - DNA, 23 bp, synthetic construct
  misc_feature 1..23: note = Synthetic Polynucleotide
  source 1..23: mol_type = other DNA
gcacytgtgaggaagttcctggg

SEQ ID NO: 1016 - DNA, 23 bp, synthetic construct
  misc_feature 1..23: note = Synthetic Polynucleotide
  source 1..23: mol_type = other DNA
cacytgtgaggaagttcctgggg

SEQ ID NO: 1017 - DNA, 23 bp, synthetic construct
  misc_feature 1..23: note = Synthetic Polynucleotide
  source 1..23: mol_type = other DNA
cacygagggaaagcactgcaggg

SEQ ID NO: 1018 - DNA, 23 bp, synthetic construct
  misc_feature 1..23: note = Synthetic Polynucleotide
  source 1..23: mol_type = other DNA
gcacygagggaaagcactgcagg

SEQ ID NO: 1019 - DNA, 23 bp, synthetic construct
  misc_feature 1..23: note = Synthetic Polynucleotide
  source 1..23: mol_type = other DNA
cactgytgacgaaggtagcaggg

SEQ ID NO: 1020 - DNA, 23 bp, synthetic construct
  misc_feature 1..23: note = Synthetic Polynucleotide
  source 1..23: mol_type = other DNA
gcactgytgacgaaggtagcagg

SEQ ID NO: 1021 - DNA, 23 bp, synthetic construct
  misc_feature 1..23: note = Synthetic Polynucleotide
  source 1..23: mol_type = other DNA
cactgygagtaagctggaagtgg

SEQ ID NO: 1022 - DNA, 23 bp, synthetic construct
  misc_feature 1..23: note = Synthetic Polynucleotide
  source 1..23: mol_type = other DNA
cactggygtatacacaggtgagg

SEQ ID NO: 1023 - DNA, 23 bp, synthetic construct
  misc_feature 1..23: note = Synthetic Polynucleotide
  source 1..23: mol_type = other DNA
cactggayatggaaatagagagg

SEQ ID NO: 1024 - DNA, 23 bp, synthetic construct
  misc_feature 1..23: note = Synthetic Polynucleotide
  source 1..23: mol_type = other DNA
cactaytggggtctcggtcaagg

SEQ ID NO: 1025 - DNA, 23 bp, synthetic construct
  misc_feature 1..23: note = Synthetic Polynucleotide
  source 1..23: mol_type = other DNA
gcacgygagtggccatcctcagg

SEQ ID NO: 1026 - DNA, 23 bp, synthetic construct
  misc_feature 1..23: note = Synthetic Polynucleotide
  source 1..23: mol_type = other DNA
cacgygagtggccatcctcaggg

SEQ ID NO: 1027 - DNA, 23 bp, synthetic construct
  misc_feature 1..23: note = Synthetic Polynucleotide
  source 1..23: mol_type = other DNA
cacgagtytcttactgagaatgg

SEQ ID NO: 1028 - DNA, 23 bp, synthetic construct
  misc_feature 1..23: note = Synthetic Polynucleotide
  source 1..23: mol_type = other DNA
gagtytcttactgagaatggagg

SEQ ID NO: 1029 - DNA, 23 bp, synthetic construct
  misc_feature 1..23: note = Synthetic Polynucleotide
  source 1..23: mol_type = other DNA
cacaytgacacatgtggccaggg

SEQ ID NO: 1030 - DNA, 23 bp, synthetic construct
  misc_feature 1..23: note = Synthetic Polynucleotide
  source 1..23: mol_type = other DNA
ccacaytgacacatgtggccagg

SEQ ID NO: 1031 - DNA, 23 bp, synthetic construct
  misc_feature 1..23: note = Synthetic Polynucleotide
  source 1..23: mol_type = other DNA
cacataayacgaactggtgctgg

SEQ ID NO: 1032 - DNA, 23 bp, synthetic construct
  misc_feature 1..23: note = Synthetic Polynucleotide
  source 1..23: mol_type = other DNA
cacagygggtccctgtctcctgg

SEQ ID NO: 1033 - DNA, 23 bp, synthetic construct
  misc_feature 1..23: note = Synthetic Polynucleotide
  source 1..23: mol_type = other DNA
acagygggtccctgtctcctggg

SEQ ID NO: 1034 - DNA, 23 bp, synthetic construct
  misc_feature 1..23: note = Synthetic Polynucleotide
  source 1..23: mol_type = other DNA
caaygatgagcttgaagatgagg

SEQ ID NO: 1035 - DNA, 23 bp, synthetic construct
  misc_feature 1..23: note = Synthetic Polynucleotide
  source 1..23: mol_type = other DNA
caaygaagaggaattgcccctgg

SEQ ID NO: 1036 - DNA, 23 bp, synthetic construct
  misc_feature 1..23: note = Synthetic Polynucleotide
  source 1..23: mol_type = other DNA
caagtygttagctgccaacaagg

SEQ ID NO: 1037 - DNA, 23 bp, synthetic construct
  misc_feature 1..23: note = Synthetic Polynucleotide
  source 1..23: mol_type = other DNA
caagaytggggacttcgggctgg

SEQ ID NO: 1038 - DNA, 23 bp, synthetic construct
  misc_feature 1..23: note = Synthetic Polynucleotide
  source 1..23: mol_type = other DNA
caagayggcggctcccagggagg

SEQ ID NO: 1039 - DNA, 23 bp, synthetic construct
  misc_feature 1..23: note = Synthetic Polynucleotide
  source 1..23: mol_type = other DNA
caagaggytggtgatctgcaagg

SEQ ID NO: 1040 - DNA, 23 bp, synthetic construct
  misc_feature 1..23: note = Synthetic Polynucleotide
  source 1..23: mol_type = other DNA
caagaayagtaggtaaggccagg

SEQ ID NO: 1041 - DNA, 23 bp, synthetic construct
  misc_feature 1..23: note = Synthetic Polynucleotide
  source 1..23: mol_type = other DNA
caagaaaygtgctgctgatctgg

SEQ ID NO: 1042 - DNA, 23 bp, synthetic construct
  misc_feature 1..23: note = Synthetic Polynucleotide
  source 1..23: mol_type = other DNA
aagaaaygtgctgctgatctggg

SEQ ID NO: 1043 - DNA, 23 bp, synthetic construct
  misc_feature 1..23: note = Synthetic Polynucleotide
  source 1..23: mol_type = other DNA
caaaatayggaacttgattttgg

SEQ ID NO: 1044 - DNA, 23 bp, synthetic construct
  misc_feature 1..23: note = Synthetic Polynucleotide
  source 1..23: mol_type = other DNA
attgaaayagagtaacaagaagg

SEQ ID NO: 1045 - DNA, 23 bp, synthetic construct
  misc_feature 1..23: note = Synthetic Polynucleotide
  source 1..23: mol_type = other DNA
atgytggaggcttggaactctgg

SEQ ID NO: 1046 - DNA, 23 bp, synthetic construct
  misc_feature 1..23: note = Synthetic Polynucleotide
  source 1..23: mol_type = other DNA
atgtatyaattacagacacttgg

SEQ ID NO: 1047 - DNA, 23 bp, synthetic construct
  misc_feature 1..23: note = Synthetic Polynucleotide
  source 1..23: mol_type = other DNA
atggyaaggagcaagggagcagg

SEQ ID NO: 1048 - DNA, 23 bp, synthetic construct
  misc_feature 1..23: note = Synthetic Polynucleotide
  source 1..23: mol_type = other DNA
atcytagggtaaggtgacttagg

SEQ ID NO: 1049 - DNA, 23 bp, synthetic construct
  misc_feature 1..23: note = Synthetic Polynucleotide
  source 1..23: mol_type = other DNA
atcyaaagcaaaagacaagcagg

SEQ ID NO: 1050 - DNA, 23 bp, synthetic construct
  misc_feature 1..23: note = Synthetic Polynucleotide
  source 1..23: mol_type = other DNA
atcaytggggtggatcccgaagg

SEQ ID NO: 1051 - DNA, 23 bp, synthetic construct
  misc_feature 1..23: note = Synthetic Polynucleotide
  source 1..23: mol_type = other DNA
tcaytggggtggatcccgaaggg

SEQ ID NO: 1052 - DNA, 23 bp, synthetic construct
  misc_feature 1..23: note = Synthetic Polynucleotide
  source 1..23: mol_type = other DNA
atcatytggaacagtctacaagg

SEQ ID NO: 1053 - DNA, 23 bp, synthetic construct
  misc_feature 1..23: note = Synthetic Polynucleotide
  source 1..23: mol_type = other DNA
tcatytggaacagtctacaaggg

SEQ ID NO: 1054 - DNA, 23 bp, synthetic construct
  misc_feature 1..23: note = Synthetic Polynucleotide
  source 1..23: mol_type = other DNA
atcattgygagtgtattataagg

SEQ ID NO: 1055 - DNA, 23 bp, synthetic construct
  misc_feature 1..23: note = Synthetic Polynucleotide
  source 1..23: mol_type = other DNA
tcattgygagtgtattataaggg

SEQ ID NO: 1056 - DNA, 23 bp, synthetic construct
  misc_feature 1..23: note = Synthetic Polynucleotide
  source 1..23: mol_type = other DNA
cattgygagtgtattataagggg

SEQ ID NO: 1057 - DNA, 23 bp, synthetic construct
  misc_feature 1..23: note = Synthetic Polynucleotide
  source 1..23: mol_type = other DNA
atcatggyaagcaagaaacaagg

SEQ ID NO: 1058 - DNA, 23 bp, synthetic construct
  misc_feature 1..23: note = Synthetic Polynucleotide
  source 1..23: mol_type = other DNA
atayagttttcagggcccggagg

SEQ ID NO: 1059 - DNA, 23 bp, synthetic construct
  misc_feature 1..23: note = Synthetic Polynucleotide
  source 1..23: mol_type = other DNA
ctgatayagttttcagggcccgg

SEQ ID NO: 1060 - DNA, 23 bp, synthetic construct
  misc_feature 1..23: note = Synthetic Polynucleotide
  source 1..23: mol_type = other DNA
atatagaygcctctgctcccagg

SEQ ID NO: 1061 - DNA, 23 bp, synthetic construct
  misc_feature 1..23: note = Synthetic Polynucleotide
  source 1..23: mol_type = other DNA
atagtgtycctaaaaggcacggg

SEQ ID NO: 1062 - DNA, 23 bp, synthetic construct
  misc_feature 1..23: note = Synthetic Polynucleotide
  source 1..23: mol_type = other DNA
atagatgycagcacgtttgaagg

SEQ ID NO: 1063 - DNA, 23 bp, synthetic construct
  misc_feature 1..23: note = Synthetic Polynucleotide
  source 1..23: mol_type = other DNA
agtaygtgaagctccagctgtgg

SEQ ID NO: 1064 - DNA, 23 bp, synthetic construct
  misc_feature 1..23: note = Synthetic Polynucleotide
  source 1..23: mol_type = other DNA
cttcaggygagggctggggtggg

SEQ ID NO: 1065 - DNA, 23 bp, synthetic construct
  misc_feature 1..23: note = Synthetic Polynucleotide
  source 1..23: mol_type = other DNA
aggygagggctggggtgggcagg

SEQ ID NO: 1066 - DNA, 23 bp, synthetic construct
  misc_feature 1..23: note = Synthetic Polynucleotide
  source 1..23: mol_type = other DNA
aggtgagyaatctgtcagcaggg

SEQ ID NO: 1067 - DNA, 23 bp, synthetic construct
  misc_feature 1..23: note = Synthetic Polynucleotide
  source 1..23: mol_type = other DNA
agggytggagtaggggccatcgg

SEQ ID NO: 1068 - DNA, 23 bp, synthetic construct
  misc_feature 1..23: note = Synthetic Polynucleotide
  source 1..23: mol_type = other DNA
agggaytgcctacaaacaccagg

SEQ ID NO: 1069 - DNA, 23 bp, synthetic construct
  misc_feature 1..23: note = Synthetic Polynucleotide
  source 1..23: mol_type = other DNA
agcygtgggacaagagcagccgg

SEQ ID NO: 1070 - DNA, 23 bp, synthetic construct
  misc_feature 1..23: note = Synthetic Polynucleotide
  source 1..23: mol_type = other DNA
agcyggtattccctctcgagtgg

SEQ ID NO: 1071 - DNA, 23 bp, synthetic construct
  misc_feature 1..23: note = Synthetic Polynucleotide
  source 1..23: mol_type = other DNA
agcygggtgcccagtacccttgg

SEQ ID NO: 1072 - DNA, 23 bp, synthetic construct
  misc_feature 1..23: note = Synthetic Polynucleotide
  source 1..23: mol_type = other DNA
gagcyggggactggacaatttgg

SEQ ID NO: 1073 - DNA, 23 bp, synthetic construct
  misc_feature 1..23: note = Synthetic Polynucleotide
  source 1..23: mol_type = other DNA
agcyggggactggacaatttggg

SEQ ID NO: 1074 - DNA, 23 bp, synthetic construct
  misc_feature 1..23: note = Synthetic Polynucleotide
  source 1..23: mol_type = other DNA
agcyaggtggcgacctgctccgg

SEQ ID NO: 1075 - DNA, 23 bp, synthetic construct
  misc_feature 1..23: note = Synthetic Polynucleotide
  source 1..23: mol_type = other DNA
agcttytttgtagacaggcatgg

SEQ ID NO: 1076 - DNA, 23 bp, synthetic construct
  misc_feature 1..23: note = Synthetic Polynucleotide
  source 1..23: mol_type = other DNA
agctgtgygatgaagcaggcagg

SEQ ID NO: 1077 - DNA, 23 bp, synthetic construct
  misc_feature 1..23: note = Synthetic Polynucleotide
  source 1..23: mol_type = other DNA
gctggaycgaggccttaaaaggg

SEQ ID NO: 1078 - DNA, 23 bp, synthetic construct
  misc_feature 1..23: note = Synthetic Polynucleotide
  source 1..23: mol_type = other DNA
agctggaycgaggccttaaaagg

SEQ ID NO: 1079 - DNA, 23 bp, synthetic construct
  misc_feature 1..23: note = Synthetic Polynucleotide
  source 1..23: mol_type = other DNA
agctayggccgcagtgattctgg

SEQ ID NO: 1080 - DNA, 23 bp, synthetic construct
  misc_feature 1..23: note = Synthetic Polynucleotide
  source 1..23: mol_type = other DNA
attgycttcccattcccaggtgg

SEQ ID NO: 1081 - DNA, 23 bp, synthetic construct
  misc_feature 1..23: note = Synthetic Polynucleotide
  source 1..23: mol_type = other DNA
agcattgycttcccattcccagg

SEQ ID NO: 1082 - DNA, 23 bp, synthetic construct
  misc_feature 1..23: note = Synthetic Polynucleotide
  source 1..23: mol_type = other DNA
cagcaagbacgtgggcctctggg

SEQ ID NO: 1083 - DNA, 23 bp, synthetic construct
  misc_feature 1..23: note = Synthetic Polynucleotide
  source 1..23: mol_type = other DNA
agcaagbacgtgggcctctgggg

SEQ ID NO: 1084 - DNA, 23 bp, synthetic construct
  misc_feature 1..23: note = Synthetic Polynucleotide
  source 1..23: mol_type = other DNA
gcaagbacgtgggcctctggggg

SEQ ID NO: 1085 - DNA, 23 bp, synthetic construct
  misc_feature 1..23: note = Synthetic Polynucleotide
  source 1..23: mol_type = other DNA
agaytgtggatccgctggcccgg

SEQ ID NO: 1086 - DNA, 23 bp, synthetic construct
  misc_feature 1..23: note = Synthetic Polynucleotide
  source 1..23: mol_type = other DNA
agaytggtgtgcgcaacatccgg

SEQ ID NO: 1087 - DNA, 23 bp, synthetic construct
  misc_feature 1..23: note = Synthetic Polynucleotide
  source 1..23: mol_type = other DNA
agaygagggtctcagccctgcgg

SEQ ID NO: 1088 - DNA, 23 bp, synthetic construct
  misc_feature 1..23: note = Synthetic Polynucleotide
  source 1..23: mol_type = other DNA
agatayggcttctaaaccgaagg

SEQ ID NO: 1089 - DNA, 23 bp, synthetic construct
  misc_feature 1..23: note = Synthetic Polynucleotide
  source 1..23: mol_type = other DNA
agaggytgtgtttacggtagcgg

SEQ ID NO: 1090 - DNA, 23 bp, synthetic construct
  misc_feature 1..23: note = Synthetic Polynucleotide
  source 1..23: mol_type = other DNA
agaagaygctgtttaatctgagg

SEQ ID NO: 1091 - DNA, 23 bp, synthetic construct
  misc_feature 1..23: note = Synthetic Polynucleotide
  source 1..23: mol_type = other DNA
actytttgggatcgacttcctgg

SEQ ID NO: 1092 - DNA, 23 bp, synthetic construct
  misc_feature 1..23: note = Synthetic Polynucleotide
  source 1..23: mol_type = other DNA
actytgatagagtaaataatagg

SEQ ID NO: 1093 - DNA, 23 bp, synthetic construct
  misc_feature 1..23: note = Synthetic Polynucleotide
  source 1..23: mol_type = other DNA
acttytatagtattgaataaagg

SEQ ID NO: 1094 - DNA, 23 bp, synthetic construct
  misc_feature 1..23: note = Synthetic Polynucleotide
  source 1..23: mol_type = other DNA
cttytatagtattgaataaaggg

SEQ ID NO: 1095 - DNA, 23 bp, synthetic construct
  misc_feature 1..23: note = Synthetic Polynucleotide
  source 1..23: mol_type = other DNA
acttygatagagtaaataatagg

SEQ ID NO: 1096 - DNA, 23 bp, synthetic construct
  misc_feature 1..23: note = Synthetic Polynucleotide
  source 1..23: mol_type = other DNA
acttyatttgactactttaatgg

SEQ ID NO: 1097 - DNA, 23 bp, synthetic construct
  misc_feature 1..23: note = Synthetic Polynucleotide
  source 1..23: mol_type = other DNA
cttyattcaaagaccaggaaggg

SEQ ID NO: 1098 - DNA, 23 bp, synthetic construct
  misc_feature 1..23: note = Synthetic Polynucleotide
  source 1..23: mol_type = other DNA
acttyattcaaagaccaggaagg

SEQ ID NO: 1099 - DNA, 23 bp, synthetic construct
  misc_feature 1..23: note = Synthetic Polynucleotide
  source 1..23: mol_type = other DNA
acttttayagtattgaataaagg

SEQ ID NO: 1100 - DNA, 23 bp, synthetic construct
  misc_feature 1..23: note = Synthetic Polynucleotide
  source 1..23: mol_type = other DNA
cttttayagtattgaataaaggg

SEQ ID NO: 1101 - DNA, 23 bp, synthetic construct
  misc_feature 1..23: note = Synthetic Polynucleotide
  source 1..23: mol_type = other DNA
acttayagcttcttgtctccagg

SEQ ID NO: 1102 - DNA, 23 bp, synthetic construct
  misc_feature 1..23: note = Synthetic Polynucleotide
  source 1..23: mol_type = other DNA
actgataycaggtgagagccagg

SEQ ID NO: 1103 - DNA, 23 bp, synthetic construct
  misc_feature 1..23: note = Synthetic Polynucleotide
  source 1..23: mol_type = other DNA
ctgataycaggtgagagccaggg

SEQ ID NO: 1104 - DNA, 23 bp, synthetic construct
  misc_feature 1..23: note = Synthetic Polynucleotide
  source 1..23: mol_type = other DNA
acgytgagctggggctgcgcggg

SEQ ID NO: 1105 - DNA, 23 bp, synthetic construct
  misc_feature 1..23: note = Synthetic Polynucleotide
  source 1..23: mol_type = other DNA
cacgytgagctggggctgcgcgg

SEQ ID NO: 1106 - DNA, 23 bp, synthetic construct
  misc_feature 1..23: note = Synthetic Polynucleotide
  source 1..23: mol_type = other DNA
accytatgatccgcccgccttgg

SEQ ID NO: 1107 - DNA, 23 bp, synthetic construct
  misc_feature 1..23: note = Synthetic Polynucleotide
  source 1..23: mol_type = other DNA
accygtgaagggaacagagatgg

SEQ ID NO: 1108 - DNA, 23 bp, synthetic construct
  misc_feature 1..23: note = Synthetic Polynucleotide
  source 1..23: mol_type = other DNA
ttcaccygtatctgtatggcagg

SEQ ID NO: 1109 - DNA, 23 bp, synthetic construct
  misc_feature 1..23: note = Synthetic Polynucleotide
  source 1..23: mol_type = other DNA
accygtatctgtatggcaggtgg

SEQ ID NO: 1110 - DNA, 23 bp, synthetic construct
  misc_feature 1..23: note = Synthetic Polynucleotide
  source 1..23: mol_type = other DNA
accygagatgcaaaatagggagg

SEQ ID NO: 1111 - DNA, 23 bp, synthetic construct
  misc_feature 1..23: note = Synthetic Polynucleotide
  source 1..23: mol_type = other DNA
gtgaccygagatgcaaaataggg

SEQ ID NO: 1112 - DNA, 23 bp, synthetic construct
  misc_feature 1..23: note = Synthetic Polynucleotide
  source 1..23: mol_type = other DNA
ggtgaccygagatgcaaaatagg

SEQ ID NO: 1113 - DNA, 23 bp, synthetic construct
  misc_feature 1..23: note = Synthetic Polynucleotide
  source 1..23: mol_type = other DNA
accygagagggagggcagccagg

SEQ ID NO: 1114 - DNA, 23 bp, synthetic construct
  misc_feature 1..23: note = Synthetic Polynucleotide
  source 1..23: mol_type = other DNA
acctgygggtgcgtggctgcagg

SEQ ID NO: 1115 - DNA, 23 bp, synthetic construct
  misc_feature 1..23: note = Synthetic Polynucleotide
  source 1..23: mol_type = other DNA
cctgygggtgcgtggctgcaggg

SEQ ID NO: 1116 - DNA, 23 bp, synthetic construct
  misc_feature 1..23: note = Synthetic Polynucleotide
  source 1..23: mol_type = other DNA
accgtygtggcccagcaggacgg

SEQ ID NO: 1117 - DNA, 23 bp, synthetic construct
  misc_feature 1..23: note = Synthetic Polynucleotide
  source 1..23: mol_type = other DNA
acayatttcttaggtttgagggg

SEQ ID NO: 1118 - DNA, 23 bp, synthetic construct
  misc_feature 1..23: note = Synthetic Polynucleotide
  source 1..23: mol_type = other DNA
gacayatttcttaggtttgaggg

SEQ ID NO: 1119 - DNA, 23 bp, synthetic construct
  misc_feature 1..23: note = Synthetic Polynucleotide
  source 1..23: mol_type = other DNA
agacayatttcttaggtttgagg

SEQ ID NO: 1120 - DNA, 23 bp, synthetic construct
  misc_feature 1..23: note = Synthetic Polynucleotide
  source 1..23: mol_type = other DNA
acayatatccctctggacattgg

SEQ ID NO: 1121 - DNA, 23 bp, synthetic construct
  misc_feature 1..23: note = Synthetic Polynucleotide
  source 1..23: mol_type = other DNA
acayagtacaggattcctgcggg

SEQ ID NO: 1122 - DNA, 23 bp, synthetic construct
  misc_feature 1..23: note = Synthetic Polynucleotide
  source 1..23: mol_type = other DNA
gacayagtacaggattcctgcgg

SEQ ID NO: 1123 - DNA, 23 bp, synthetic construct
  misc_feature 1..23: note = Synthetic Polynucleotide
  source 1..23: mol_type = other DNA
acayaggtgcgacggccccaggg

SEQ ID NO: 1124 - DNA, 23 bp, synthetic construct
  misc_feature 1..23: note = Synthetic Polynucleotide
  source 1..23: mol_type = other DNA
gacayaggtgcgacggccccagg

SEQ ID NO: 1125 - DNA, 23 bp, synthetic construct
  misc_feature 1..23: note = Synthetic Polynucleotide
  source 1..23: mol_type = other DNA
acattygggcttttggtaagtgg

SEQ ID NO: 1126 - DNA, 23 bp, synthetic construct
  misc_feature 1..23: note = Synthetic Polynucleotide
  source 1..23: mol_type = other DNA
acatgyagcaggcgcagtagggg

SEQ ID NO: 1127 - DNA, 23 bp, synthetic construct
  misc_feature 1..23: note = Synthetic Polynucleotide
  source 1..23: mol_type = other DNA
gacatgyagcaggcgcagtaggg

SEQ ID NO: 1128 - DNA, 23 bp, synthetic construct
  misc_feature 1..23: note = Synthetic Polynucleotide
  source 1..23: mol_type = other DNA
agacatgyagcaggcgcagtagg

SEQ ID NO: 1129 - DNA, 23 bp, synthetic construct
  misc_feature 1..23: note = Synthetic Polynucleotide
  source 1..23: mol_type = other DNA
acatayatccctctggacattgg

SEQ ID NO: 1130 - DNA, 23 bp, synthetic construct
  misc_feature 1..23: note = Synthetic Polynucleotide
  source 1..23: mol_type = other DNA
acagtyttaggacatcattgtgg

SEQ ID NO: 1131 - DNA, 23 bp, synthetic construct
  misc_feature 1..23: note = Synthetic Polynucleotide
  source 1..23: mol_type = other DNA
acagttayaggttctggtcctgg

SEQ ID NO: 1132 - DNA, 23 bp, synthetic construct
  misc_feature 1..23: note = Synthetic Polynucleotide
  source 1..23: mol_type = other DNA
gttayaggttctggtcctggagg

SEQ ID NO: 1133 - DNA, 23 bp, synthetic construct
  misc_feature 1..23: note = Synthetic Polynucleotide
  source 1..23: mol_type = other DNA
acaaggygagcgtgggctgctgg

SEQ ID NO: 1134 - DNA, 23 bp, synthetic construct
  misc_feature 1..23: note = Synthetic Polynucleotide
  source 1..23: mol_type = other DNA
caaggygagcgtgggctgctggg

SEQ ID NO: 1135 - DNA, 23 bp, synthetic construct
  misc_feature 1..23: note = Synthetic Polynucleotide
  source 1..23: mol_type = other DNA
acaagatygtctacagaaacagg

SEQ ID NO: 1136 - DNA, 23 bp, synthetic construct
  misc_feature 1..23: note = Synthetic Polynucleotide
  source 1..23: mol_type = other DNA
aatyttggaggcagaagctctgg

SEQ ID NO: 1137 - DNA, 23 bp, synthetic construct
  misc_feature 1..23: note = Synthetic Polynucleotide
  source 1..23: mol_type = other DNA
aattygttttcttacaaaatcgg

SEQ ID NO: 1138 - DNA, 23 bp, synthetic construct
  misc_feature 1..23: note = Synthetic Polynucleotide
  source 1..23: mol_type = other DNA
aatgtyggcaccatcctgggagg

SEQ ID NO: 1139 - DNA, 23 bp, synthetic construct
  misc_feature 1..23: note = Synthetic Polynucleotide
  source 1..23: mol_type = other DNA
aatggatyctgaatgtacagagg

SEQ ID NO: 1140 - DNA, 23 bp, synthetic construct
  misc_feature 1..23: note = Synthetic Polynucleotide
  source 1..23: mol_type = other DNA
aataaagyagaatatcgtcaagg

SEQ ID NO: 1141 - DNA, 23 bp, synthetic construct
  misc_feature 1..23: note = Synthetic Polynucleotide
  source 1..23: mol_type = other DNA
aagygtgtgcctgtgtgccgagg

SEQ ID NO: 1142 - DNA, 23 bp, synthetic construct
  misc_feature 1..23: note = Synthetic Polynucleotide
  source 1..23: mol_type = other DNA
aagygattgcagcagtgaaatgg

SEQ ID NO: 1143 - DNA, 23 bp, synthetic construct
  misc_feature 1..23: note = Synthetic Polynucleotide
  source 1..23: mol_type = other DNA
aagyagattttctgccaggtggg

SEQ ID NO: 1144 - DNA, 23 bp, synthetic construct
  misc_feature 1..23: note = Synthetic Polynucleotide
  source 1..23: mol_type = other DNA
gaagyagattttctgccaggtgg

SEQ ID NO: 1145 - DNA, 23 bp, synthetic construct
  misc_feature 1..23: note = Synthetic Polynucleotide
  source 1..23: mol_type = other DNA
gtagaagyagattttctgccagg

SEQ ID NO: 1146 - DNA, 23 bp, synthetic construct
  misc_feature 1..23: note = Synthetic Polynucleotide
  source 1..23: mol_type = other DNA
aagtytgatgcagaccagaaagg

SEQ ID NO: 1147 - DNA, 23 bp, synthetic construct
  misc_feature 1..23: note = Synthetic Polynucleotide
  source 1..23: mol_type = other DNA
aaggaaygtgttttacccggagg

SEQ ID NO: 1148 - DNA, 23 bp, synthetic construct
  misc_feature 1..23: note = Synthetic Polynucleotide
  source 1..23: mol_type = other DNA
aagayggtgacagaaaaggcagg

SEQ ID NO: 1149 - DNA, 23 bp, synthetic construct
  misc_feature 1..23: note = Synthetic Polynucleotide
  source 1..23: mol_type = other DNA
aagaayatgcccaaaacatctgg

SEQ ID NO: 1150 - DNA, 23 bp, synthetic construct
  misc_feature 1..23: note = Synthetic Polynucleotide
  source 1..23: mol_type = other DNA
aagaaaayctacgccatgggtgg

SEQ ID NO: 1151 - DNA, 23 bp, synthetic construct
  misc_feature 1..23: note = Synthetic Polynucleotide
  source 1..23: mol_type = other DNA
aaaayctacgccatgggtggagg

SEQ ID NO: 1152 - DNA, 23 bp, synthetic construct
  misc_feature 1..23: note = Synthetic Polynucleotide
  source 1..23: mol_type = other DNA
aacyagagtaatagcgggtcagg

SEQ ID NO: 1153 - DNA, 23 bp, synthetic construct
  misc_feature 1..23: note = Synthetic Polynucleotide
  source 1..23: mol_type = other DNA
aactyggtcctgcgggatggggg

SEQ ID NO: 1154 - DNA, 23 bp, synthetic construct
  misc_feature 1..23: note = Synthetic Polynucleotide
  source 1..23: mol_type = other DNA
gaactyggtcctgcgggatgggg

SEQ ID NO: 1155 - DNA, 23 bp, synthetic construct
  misc_feature 1..23: note = Synthetic Polynucleotide
  source 1..23: mol_type = other DNA
ggaactyggtcctgcgggatggg

SEQ ID NO: 1156 - DNA, 23 bp, synthetic construct
  misc_feature 1..23: note = Synthetic Polynucleotide
  source 1..23: mol_type = other DNA
aggaactyggtcctgcgggatgg

SEQ ID NO: 1157 - DNA, 23 bp, synthetic construct
  misc_feature 1..23: note = Synthetic Polynucleotide
  source 1..23: mol_type = other DNA
aacagayaatgtcagacaagagg

SEQ ID NO: 1158 - DNA, 23 bp, synthetic construct
  misc_feature 1..23: note = Synthetic Polynucleotide
  source 1..23: mol_type = other DNA
aacaayggtggaacctgagaagg

SEQ ID NO: 1159 - DNA, 23 bp, synthetic construct
  misc_feature 1..23: note = Synthetic Polynucleotide
  source 1..23: mol_type = other DNA
aaatgyttcctgtacacctgtgg

SEQ ID NO: 1160 - DNA, 23 bp, synthetic construct
  misc_feature 1..23: note = Synthetic Polynucleotide
  source 1..23: mol_type = other DNA
aaatatgyggtcacactttgtgg

SEQ ID NO: 1161 - DNA, 23 bp, synthetic construct
  misc_feature 1..23: note = Synthetic Polynucleotide
  source 1..23: mol_type = other DNA
aaaggygggcctgggacctgagg

SEQ ID NO: 1162 - DNA, 23 bp, synthetic construct
  misc_feature 1..23: note = Synthetic Polynucleotide
  source 1..23: mol_type = other DNA
aaaaygtgttggtgcttgagggg

SEQ ID NO: 1163 - DNA, 23 bp, synthetic construct
  misc_feature 1..23: note = Synthetic Polynucleotide
  source 1..23: mol_type = other DNA
gaaaaygtgttggtgcttgaggg

SEQ ID NO: 1164 - DNA, 23 bp, synthetic construct
  misc_feature 1..23: note = Synthetic Polynucleotide
  source 1..23: mol_type = other DNA
agaaaaygtgttggtgcttgagg

SEQ ID NO: 1165 - DNA, 23 bp, synthetic construct
  misc_feature 1..23: note = Synthetic Polynucleotide
  source 1..23: mol_type = other DNA
aaaattygcaagtatgtcttagg

SEQ ID NO: 1166 - DNA, 23 bp, synthetic construct
  misc_feature 1..23: note = Synthetic Polynucleotide
  source 1..23: mol_type = other DNA
aaattygcaagtatgtcttaggg

SEQ ID NO: 1167 - DNA, 23 bp, synthetic construct
  misc_feature 1..23: note = Synthetic Polynucleotide
  source 1..23: mol_type = other DNA
tggttcyaatggatgtctgctgg

SEQ ID NO: 1168 - DNA, 23 bp, synthetic construct
  misc_feature 1..23: note = Synthetic Polynucleotide
  source 1..23: mol_type = other DNA
ggttcyaatggatgtctgctggg

SEQ ID NO: 1169 - DNA, 23 bp, synthetic construct
  misc_feature 1..23: note = Synthetic Polynucleotide
  source 1..23: mol_type = other DNA
tggctgycagggacccagcaagg

SEQ ID NO: 1170 - DNA, 23 bp, synthetic construct
  misc_feature 1..23: note = Synthetic Polynucleotide
  source 1..23: mol_type = other DNA
ctgycagggacccagcaaggagg

SEQ ID NO: 1171 - DNA, 23 bp, synthetic construct
  misc_feature 1..23: note = Synthetic Polynucleotide
  source 1..23: mol_type = other DNA
agttccygacggctgaggagcgg

SEQ ID NO: 1172 - DNA, 23 bp, synthetic construct
  misc_feature 1..23: note = Synthetic Polynucleotide
  source 1..23: mol_type = other DNA
ccagyacggggaggtgtacgagg

SEQ ID NO: 1173 - DNA, 23 bp, synthetic construct
  misc_feature 1..23: note = Synthetic Polynucleotide
  source 1..23: mol_type = other DNA
cagyacggggaggtgtacgaggg

SEQ ID NO: 1174 - DNA, 23 bp, synthetic construct
  misc_feature 1..23: note = Synthetic Polynucleotide
  source 1..23: mol_type = other DNA
agggcygtcggaccttcgagtgg

SEQ ID NO: 1175 - DNA, 23 bp, synthetic construct
  misc_feature 1..23: note = Synthetic Polynucleotide
  source 1..23: mol_type = other DNA
gggcygtcggaccttcgagtggg

SEQ ID NO: 1176 - DNA, 23 bp, synthetic construct
  misc_feature 1..23: note = Synthetic Polynucleotide
  source 1..23: mol_type = other DNA
ggcygtcggaccttcgagtgggg

SEQ ID NO: 1177 - DNA, 23 bp, synthetic construct
  misc_feature 1..23: note = Synthetic Polynucleotide
  source 1..23: mol_type = other DNA
attcccygatgaggcagatgcgg

SEQ ID NO: 1178 - DNA, 23 bp, synthetic construct
  misc_feature 1..23: note = Synthetic Polynucleotide
  source 1..23: mol_type = other DNA
ttcccygatgaggcagatgcggg

SEQ ID NO: 1179 - DNA, 23 bp, synthetic construct
  misc_feature 1..23: note = Synthetic Polynucleotide
  source 1..23: mol_type = other DNA
ataccyggcaagcaatagcgcgg

SEQ ID NO: 1180 - DNA, 23 bp, synthetic construct
  misc_feature 1..23: note = Synthetic Polynucleotide
  source 1..23: mol_type = other DNA
gtaaytgcaagatctacaaaagg

SEQ ID NO: 1181 - DNA, 23 bp, synthetic construct
  misc_feature 1..23: note = Synthetic Polynucleotide
  source 1..23: mol_type = other DNA
acatygacaaccatcggctatgg

SEQ ID NO: 1182 - DNA, 23 bp, synthetic construct
  misc_feature 1..23: note = Synthetic Polynucleotide
  source 1..23: mol_type = other DNA
gaccygctgccgtcagcgcctgg

SEQ ID NO: 1183 - DNA, 23 bp, synthetic construct
  misc_feature 1..23: note = Synthetic Polynucleotide
  source 1..23: mol_type = other DNA
tcccacyggacaactgcctctgg

SEQ ID NO: 1184 - DNA, 23 bp, synthetic construct
  misc_feature 1..23: note = Synthetic Polynucleotide
  source 1..23: mol_type = other DNA
gtagayaccttagagaacaatgg

SEQ ID NO: 1185 - DNA, 23 bp, synthetic construct
  misc_feature 1..23: note = Synthetic Polynucleotide
  source 1..23: mol_type = other DNA
tgccaytgctgtggacaacctgg

SEQ ID NO: 1186 - DNA, 23 bp, synthetic construct
  misc_feature 1..23: note = Synthetic Polynucleotide
  source 1..23: mol_type = other DNA
gtcgcygcccgtggcccctgcgg

SEQ ID NO: 1187 - DNA, 23 bp, synthetic construct
  misc_feature 1..23: note = Synthetic Polynucleotide
  source 1..23: mol_type = other DNA
attggyacgtgatccatcctagg

SEQ ID NO: 1188 - DNA, 23 bp, synthetic construct
  misc_feature 1..23: note = Synthetic Polynucleotide
  source 1..23: mol_type = other DNA
gacggcyctgtaggctttggagg

SEQ ID NO: 1189 - DNA, 23 bp, synthetic construct
  misc_feature 1..23: note = Synthetic Polynucleotide
  source 1..23: mol_type = other DNA
cggccaygcagtcctgtgccagg

SEQ ID NO: 1190 - DNA, 23 bp, synthetic construct
  misc_feature 1..23: note = Synthetic Polynucleotide
  source 1..23: mol_type = other DNA
ggccaygcagtcctgtgccaggg

SEQ ID NO: 1191 - DNA, 23 bp, synthetic construct
  misc_feature 1..23: note = Synthetic Polynucleotide
  source 1..23: mol_type = other DNA
ctgcyggtctaccagggcaaagg

SEQ ID NO: 1192 - DNA, 23 bp, synthetic construct
  misc_feature 1..23: note = Synthetic Polynucleotide
  source 1..23: mol_type = other DNA
tgatytcttgggagaagaactgg

SEQ ID NO: 1193 - DNA, 23 bp, synthetic construct
  misc_feature 1..23: note = Synthetic Polynucleotide
  source 1..23: mol_type = other DNA
gcccygcacgcaaatgtgagtgg

SEQ ID NO: 1194 - DNA, 23 bp, synthetic construct
  misc_feature 1..23: note = Synthetic Polynucleotide
  source 1..23: mol_type = other DNA
cccygcacgcaaatgtgagtggg

SEQ ID NO: 1195 - DNA, 23 bp, synthetic construct
  misc_feature 1..23: note = Synthetic Polynucleotide
  source 1..23: mol_type = other DNA
ttgtgcyaggaagttatgacagg

SEQ ID NO: 1196 - DNA, 23 bp, synthetic construct
  misc_feature 1..23: note = Synthetic Polynucleotide
  source 1..23: mol_type = other DNA
gcgttyacgtgtcccccctttgg

SEQ ID NO: 1197 - DNA, 23 bp, synthetic construct
  misc_feature 1..23: note = Synthetic Polynucleotide
  source 1..23: mol_type = other DNA
cgttyacgtgtcccccctttggg

SEQ ID NO: 1198 - DNA, 23 bp, synthetic construct
  misc_feature 1..23: note = Synthetic Polynucleotide
  source 1..23: mol_type = other DNA
acgctytcaaggtggctgcccgg

SEQ ID NO: 1199 - DNA, 23 bp, synthetic construct
  misc_feature 1..23: note = Synthetic Polynucleotide
  source 1..23: mol_type = other DNA
cgctytcaaggtggctgcccggg

SEQ ID NO: 1200 - DNA, 23 bp, synthetic construct
  misc_feature 1..23: note = Synthetic Polynucleotide
  source 1..23: mol_type = other DNA
acttycccttattccatccacgg

SEQ ID NO: 1201 - DNA, 23 bp, synthetic construct
  misc_feature 1..23: note = Synthetic Polynucleotide
  source 1..23: mol_type = other DNA
cttycccttattccatccacggg

SEQ ID NO: 1202 - DNA, 23 bp, synthetic construct
  misc_feature 1..23: note = Synthetic Polynucleotide
  source 1..23: mol_type = other DNA
catgyttctgctgatcgtgctgg

SEQ ID NO: 1203 - DNA, 23 bp, synthetic construct
  misc_feature 1..23: note = Synthetic Polynucleotide
  source 1..23: mol_type = other DNA
atgyttctgctgatcgtgctggg

SEQ ID NO: 1204 - DNA, 23 bp, synthetic construct
  misc_feature 1..23: note = Synthetic Polynucleotide
  source 1..23: mol_type = other DNA
aggccyggagccctgtttttagg

SEQ ID NO: 1205 - DNA, 23 bp, synthetic construct
  misc_feature 1..23: note = Synthetic Polynucleotide
  source 1..23: mol_type = other DNA
gcagcycttcttagggggtgtgg

SEQ ID NO: 1206 - DNA, 23 bp, synthetic construct
  misc_feature 1..23: note = Synthetic Polynucleotide
  source 1..23: mol_type = other DNA
accatccyggagggccgcctggg

SEQ ID NO: 1207 - DNA, 23 bp, synthetic construct
  misc_feature 1..23: note = Synthetic Polynucleotide
  source 1..23: mol_type = other DNA
ctacycaactgctggagggaagg

SEQ ID NO: 1208 - DNA, 23 bp, synthetic construct
  misc_feature 1..23: note = Synthetic Polynucleotide
  source 1..23: mol_type = other DNA
gcctccyggcgctacggaagtgg

SEQ ID NO: 1209 - DNA, 23 bp, synthetic construct
  misc_feature 1..23: note = Synthetic Polynucleotide
  source 1..23: mol_type = other DNA
cctccyggcgctacggaagtggg

SEQ ID NO: 1210 - DNA, 23 bp, synthetic construct
  misc_feature 1..23: note = Synthetic Polynucleotide
  source 1..23: mol_type = other DNA
ctccyggcgctacggaagtgggg

SEQ ID NO: 1211 - DNA, 23 bp, synthetic construct
  misc_feature 1..23: note = Synthetic Polynucleotide
  source 1..23: mol_type = other DNA
tagagytctgcttgaaacatagg

SEQ ID NO: 1212 - DNA, 23 bp, synthetic construct
  misc_feature 1..23: note = Synthetic Polynucleotide
  source 1..23: mol_type = other DNA
catcgcgyccaacaaccgtaagg

SEQ ID NO: 1213 - DNA, 23 bp, synthetic construct
  misc_feature 1..23: note = Synthetic Polynucleotide
  source 1..23: mol_type = other DNA
atcgcgyccaacaaccgtaaggg

SEQ ID NO: 1214 - DNA, 23 bp, synthetic construct
  misc_feature 1..23: note = Synthetic Polynucleotide
  source 1..23: mol_type = other DNA
agctctycctcatcatggcctgg

SEQ ID NO: 1215 - DNA, 23 bp, synthetic construct
  misc_feature 1..23: note = Synthetic Polynucleotide
  source 1..23: mol_type = other DNA
tgtgtgcyggcccatcactttgg

SEQ ID NO: 1216 - DNA, 23 bp, synthetic construct
  misc_feature 1..23: note = Synthetic Polynucleotide
  source 1..23: mol_type = other DNA
tccycggtggctcaccacattgg

SEQ ID NO: 1217 - DNA, 23 bp, synthetic construct
  misc_feature 1..23: note = Synthetic Polynucleotide
  source 1..23: mol_type = other DNA
ttccyggtcatgcactacagagg

SEQ ID NO: 1218 - DNA, 23 bp, synthetic construct
  misc_feature 1..23: note = Synthetic Polynucleotide
  source 1..23: mol_type = other DNA
aatayggcggccgaggcggacgg

SEQ ID NO: 1219 - DNA, 23 bp, synthetic construct
  misc_feature 1..23: note = Synthetic Polynucleotide
  source 1..23: mol_type = other DNA
tagcaayggatcgtgggcaatgg

SEQ ID NO: 1220 - DNA, 23 bp, synthetic construct
  misc_feature 1..23: note = Synthetic Polynucleotide
  source 1..23: mol_type = other DNA
acctyaactctgggacctgctgg

SEQ ID NO: 1221 - DNA, 23 bp, synthetic construct
  misc_feature 1..23: note = Synthetic Polynucleotide
  source 1..23: mol_type = other DNA
gccctgcygtacccgctgcccgg

SEQ ID NO: 1222 - DNA, 23 bp, synthetic construct
  misc_feature 1..23: note = Synthetic Polynucleotide
  source 1..23: mol_type = other DNA
tgcygtacccgctgcccggctgg

SEQ ID NO: 1223 - DNA, 23 bp, synthetic construct
  misc_feature 1..23: note = Synthetic Polynucleotide
  source 1..23: mol_type = other DNA
atgycatcagcgtggtgttccgg

SEQ ID NO: 1224 - DNA, 23 bp, synthetic construct
  misc_feature 1..23: note = Synthetic Polynucleotide
  source 1..23: mol_type = other DNA
cagctacygggatgcccccctgg

SEQ ID NO: 1225 - DNA, 23 bp, synthetic construct
  misc_feature 1..23: note = Synthetic Polynucleotide
  source 1..23: mol_type = other DNA
agctacygggatgcccccctggg

SEQ ID NO: 1226 - DNA, 23 bp, synthetic construct
  misc_feature 1..23: note = Synthetic Polynucleotide
  source 1..23: mol_type = other DNA
tgagcyggtgggcccaatgcagg

SEQ ID NO: 1227 - DNA, 23 bp, synthetic construct
  misc_feature 1..23: note = Synthetic Polynucleotide
  source 1..23: mol_type = other DNA
ttacttcyctttggctatgaagg

SEQ ID NO: 1228 - DNA, 23 bp, synthetic construct
  misc_feature 1..23: note = Synthetic Polynucleotide
  source 1..23: mol_type = other DNA
tgcygtaccaagtgccacaaagg

SEQ ID NO: 1229 - DNA, 23 bp, synthetic construct
  misc_feature 1..23: note = Synthetic Polynucleotide
  source 1..23: mol_type = other DNA
ctccayactgagctgtgccacgg

SEQ ID NO: 1230 - DNA, 23 bp, synthetic construct
  misc_feature 1..23: note = Synthetic Polynucleotide
  source 1..23: mol_type = other DNA
ggggygcttcaaggccattgtgg

SEQ ID NO: 1231 - DNA, 23 bp, synthetic construct
  misc_feature 1..23: note = Synthetic Polynucleotide
  source 1..23: mol_type = other DNA
aagctccyggacttttttctggg

SEQ ID NO: 1232 - DNA, 23 bp, synthetic construct
  misc_feature 1..23: note = Synthetic Polynucleotide
  source 1..23: mol_type = other DNA
aaayccaccccttacgagtgcgg

SEQ ID NO: 1233 - DNA, 23 bp, synthetic construct
  misc_feature 1..23: note = Synthetic Polynucleotide
  source 1..23: mol_type = other DNA
ttccggygagtgggccacactgg

SEQ ID NO: 1234 - DNA, 23 bp, synthetic construct
  misc_feature 1..23: note = Synthetic Polynucleotide
  source 1..23: mol_type = other DNA
cacctyctttgcccatcagcagg

SEQ ID NO: 1235 - DNA, 23 bp, synthetic construct
  misc_feature 1..23: note = Synthetic Polynucleotide
  source 1..23: mol_type = other DNA
tcaccgcytcaatgacacagagg

SEQ ID NO: 1236 - DNA, 23 bp, synthetic construct
  misc_feature 1..23: note = Synthetic Polynucleotide
  source 1..23: mol_type = other DNA
ctayccgccatcccatacattgg

SEQ ID NO: 1237 - DNA, 23 bp, synthetic construct
  misc_feature 1..23: note = Synthetic Polynucleotide
  source 1..23: mol_type = other DNA
ttcacccyggtccctgtctgggg

SEQ ID NO: 1238 - DNA, 23 bp, synthetic construct
  misc_feature 1..23: note = Synthetic Polynucleotide
  source 1..23: mol_type = other DNA
gaggccayggagctgctgcaggg

SEQ ID NO: 1239 - DNA, 23 bp, synthetic construct
  misc_feature 1..23: note = Synthetic Polynucleotide
  source 1..23: mol_type = other DNA
ctcactcyaaaaaactttaccgg

SEQ ID NO: 1240 - DNA, 23 bp, synthetic construct
  misc_feature 1..23: note = Synthetic Polynucleotide
  source 1..23: mol_type = other DNA
ggtccyggatgtggtgaggaagg

SEQ ID NO: 1241 - DNA, 23 bp, synthetic construct
  misc_feature 1..23: note = Synthetic Polynucleotide
  source 1..23: mol_type = other DNA
cggcytcaaccccacagcaatgg

SEQ ID NO: 1242 - DNA, 23 bp, synthetic construct
  misc_feature 1..23: note = Synthetic Polynucleotide
  source 1..23: mol_type = other DNA
ggcytcaaccccacagcaatggg

SEQ ID NO: 1243 - DNA, 23 bp, synthetic construct
  misc_feature 1..23: note = Synthetic Polynucleotide
  source 1..23: mol_type = other DNA
gccatccygggtatggggtgggg

SEQ ID NO: 1244 - DNA, 23 bp, synthetic construct
  misc_feature 1..23: note = Synthetic Polynucleotide
  source 1..23: mol_type = other DNA
ccatccygggtatggggtggggg

SEQ ID NO: 1245 - DNA, 23 bp, synthetic construct
  misc_feature 1..23: note = Synthetic Polynucleotide
  source 1..23: mol_type = other DNA
catccygggtatggggtgggggg

SEQ ID NO: 1246 - DNA, 23 bp, synthetic construct
  misc_feature 1..23: note = Synthetic Polynucleotide
  source 1..23: mol_type = other DNA
ggtctytgacgtcttcctggtgg

SEQ ID NO: 1247 - DNA, 23 bp, synthetic construct
  misc_feature 1..23: note = Synthetic Polynucleotide
  source 1..23: mol_type = other DNA
cgcyggccaccagcactgccagg

SEQ ID NO: 1248 - DNA, 23 bp, synthetic construct
  misc_feature 1..23: note = Synthetic Polynucleotide
  source 1..23: mol_type = other DNA
gagygccgcctggaggtgcgagg

SEQ ID NO: 1249 - DNA, 23 bp, synthetic construct
  misc_feature 1..23: note = Synthetic Polynucleotide
  source 1..23: mol_type = other DNA
aatccygtactatgtctacatgg

SEQ ID NO: 1250 - DNA, 23 bp, synthetic construct
  misc_feature 1..23: note = Synthetic Polynucleotide
  source 1..23: mol_type = other DNA
atccygtactatgtctacatggg

SEQ ID NO: 1251 - DNA, 23 bp, synthetic construct
  misc_feature 1..23: note = Synthetic Polynucleotide
  source 1..23: mol_type = other DNA
tccygtactatgtctacatgggg

SEQ ID NO: 1252 - DNA, 23 bp, synthetic construct
  misc_feature 1..23: note = Synthetic Polynucleotide
  source 1..23: mol_type = other DNA
ataytttctggtccattgaaagg

SEQ ID NO: 1253 - DNA, 23 bp, synthetic construct
  misc_feature 1..23: note = Synthetic Polynucleotide
  source 1..23: mol_type = other DNA
catctytgactgtgtctacacgg

SEQ ID NO: 1254 - DNA, 23 bp, synthetic construct
  misc_feature 1..23: note = Synthetic Polynucleotide
  source 1..23: mol_type = other DNA
aggtgcygttctggggcctacgg

SEQ ID NO: 1255 - DNA, 23 bp, synthetic construct
  misc_feature 1..23: note = Synthetic Polynucleotide
  source 1..23: mol_type = other DNA
ggtgcygttctggggcctacggg

SEQ ID NO: 1256 - DNA, 23 bp, synthetic construct
  misc_feature 1..23: note = Synthetic Polynucleotide
  source 1..23: mol_type = other DNA
ggacaaygtagaaatactcctgg

SEQ ID NO: 1257 - DNA, 23 bp, synthetic construct
  misc_feature 1..23: note = Synthetic Polynucleotide
  source 1..23: mol_type = other DNA
cttaytacagttaccagaacagg

SEQ ID NO: 1258 - DNA, 23 bp, synthetic construct
  misc_feature 1..23: note = Synthetic Polynucleotide
  source 1..23: mol_type = other DNA
agcttcayggcgcccgcgccggg

SEQ ID NO: 1259 - DNA, 23 bp, synthetic construct
  misc_feature 1..23: note = Synthetic Polynucleotide
  source 1..23: mol_type = other DNA
tcayggcgcccgcgccgggccgg

SEQ ID NO: 1260 - DNA, 23 bp, synthetic construct
  misc_feature 1..23: note = Synthetic Polynucleotide
  source 1..23: mol_type = other DNA
atctctcytggggctccctgggg

SEQ ID NO: 1261 - DNA, 23 bp, synthetic construct
  misc_feature 1..23: note = Synthetic Polynucleotide
  source 1..23: mol_type = other DNA
tctcytggggctccctggggtgg

SEQ ID NO: 1262 - DNA, 23 bp, synthetic construct
  misc_feature 1..23: note = Synthetic Polynucleotide
  source 1..23: mol_type = other DNA
tcggccygtccaggtgagtgtgg

SEQ ID NO: 1263 - DNA, 23 bp, synthetic construct
  misc_feature 1..23: note = Synthetic Polynucleotide
  source 1..23: mol_type = other DNA
cttcayctgcaaggaggacctgg

SEQ ID NO: 1264 - DNA, 23 bp, synthetic construct
  misc_feature 1..23: note = Synthetic Polynucleotide
  source 1..23: mol_type = other DNA
aagcygctaattggtaggtgagg

SEQ ID NO: 1265 - DNA, 23 bp, synthetic construct
  misc_feature 1..23: note = Synthetic Polynucleotide
  source 1..23: mol_type = other DNA
tcgagaycttcgatgtgagttgg

SEQ ID NO: 1266 - DNA, 23 bp, synthetic construct
  misc_feature 1..23: note = Synthetic Polynucleotide
  source 1..23: mol_type = other DNA
cgagaycttcgatgtgagttggg

SEQ ID NO: 1267 - DNA, 23 bp, synthetic construct
  misc_feature 1..23: note = Synthetic Polynucleotide
  source 1..23: mol_type = other DNA
aagatcaytggtaactcagtagg

SEQ ID NO: 1268 - DNA, 23 bp, synthetic construct
  misc_feature 1..23: note = Synthetic Polynucleotide
  source 1..23: mol_type = other DNA
agatcaytggtaactcagtaggg

SEQ ID NO: 1269 - DNA, 23 bp, synthetic construct
  misc_feature 1..23: note = Synthetic Polynucleotide
  source 1..23: mol_type = other DNA
gatcaytggtaactcagtagggg

SEQ ID NO: 1270 - DNA, 23 bp, synthetic construct
  misc_feature 1..23: note = Synthetic Polynucleotide
  source 1..23: mol_type = other DNA
gggcyggcccccatgtgggaagg

SEQ ID NO: 1271 - DNA, 23 bp, synthetic construct
  misc_feature 1..23: note = Synthetic Polynucleotide
  source 1..23: mol_type = other DNA
gcccytcctgctgttcatcatgg

SEQ ID NO: 1272 - DNA, 23 bp, synthetic construct
  misc_feature 1..23: note = Synthetic Polynucleotide
  source 1..23: mol_type = other DNA
gatgcyggtgttcgacaacctgg

SEQ ID NO: 1273 - DNA, 23 bp, synthetic construct
  misc_feature 1..23: note = Synthetic Polynucleotide
  source 1..23: mol_type = other DNA
aggagygctatttagcatcgagg

SEQ ID NO: 1274 - DNA, 23 bp, synthetic construct
  misc_feature 1..23: note = Synthetic Polynucleotide
  source 1..23: mol_type = other DNA
aggycagctaaataagctatcgg

SEQ ID NO: 1275 - DNA, 23 bp, synthetic construct
  misc_feature 1..23: note = Synthetic Polynucleotide
  source 1..23: mol_type = other DNA
agaacaygctggggcttttgcgg

SEQ ID NO: 1276 - DNA, 23 bp, synthetic construct
  misc_feature 1..23: note = Synthetic Polynucleotide
  source 1..23: mol_type = other DNA
attcytggggagcttagcgatgg

SEQ ID NO: 1277 - DNA, 23 bp, synthetic construct
  misc_feature 1..23: note = Synthetic Polynucleotide
  source 1..23: mol_type = other DNA
tctggcycctttctctacacagg

SEQ ID NO: 1278 - DNA, 23 bp, synthetic construct
  misc_feature 1..23: note = Synthetic Polynucleotide
  source 1..23: mol_type = other DNA
ggcycctttctctacacaggagg

SEQ ID NO: 1279 - DNA, 23 bp, synthetic construct
  misc_feature 1..23: note = Synthetic Polynucleotide
  source 1..23: mol_type = other DNA
tcgcatcytccggatctttgagg

SEQ ID NO: 1280 - DNA, 23 bp, synthetic construct
  misc_feature 1..23: note = Synthetic Polynucleotide
  source 1..23: mol_type = other DNA
cgcatcytccggatctttgaggg

SEQ ID NO: 1281 - DNA, 23 bp, synthetic construct
  misc_feature 1..23: note = Synthetic Polynucleotide
  source 1..23: mol_type = other DNA
gcatcytccggatctttgagggg

SEQ ID NO: 1282 - DNA, 23 bp, synthetic construct
  misc_feature 1..23: note = Synthetic Polynucleotide
  source 1..23: mol_type = other DNA
ctaygggcagagtgggctattgg

SEQ ID NO: 1283 - DNA, 23 bp, synthetic construct
  misc_feature 1..23: note = Synthetic Polynucleotide
  source 1..23: mol_type = other DNA
ggacyggctgtcacgggctcagg

SEQ ID NO: 1284 - DNA, 23 bp, synthetic construct
  misc_feature 1..23: note = Synthetic Polynucleotide
  source 1..23: mol_type = other DNA
gtgaytgcagagagaggacttgg

SEQ ID NO: 1285 - DNA, 23 bp, synthetic construct
  misc_feature 1..23: note = Synthetic Polynucleotide
  source 1..23: mol_type = other DNA
gcttcgcygcatcgctgaaaggg

SEQ ID NO: 1286 - DNA, 23 bp, synthetic construct
  misc_feature 1..23: note = Synthetic Polynucleotide
  source 1..23: mol_type = other DNA
aaatctyagagtgtcccatctgg

SEQ ID NO: 1287 - DNA, 23 bp, synthetic construct
  misc_feature 1..23: note = Synthetic Polynucleotide
  source 1..23: mol_type = other DNA
ccayctggggaggtaggttcagg

SEQ ID NO: 1288 - DNA, 23 bp, synthetic construct
  misc_feature 1..23: note = Synthetic Polynucleotide
  source 1..23: mol_type = other DNA
gaccaytgcgctgcccgcgcagg

SEQ ID NO: 1289 - DNA, 23 bp, synthetic construct
  misc_feature 1..23: note = Synthetic Polynucleotide
  source 1..23: mol_type = other DNA
accaytgcgctgcccgcgcaggg

SEQ ID NO: 1290 - DNA, 23 bp, synthetic construct
  misc_feature 1..23: note = Synthetic Polynucleotide
  source 1..23: mol_type = other DNA
ccaytgcgctgcccgcgcagggg

SEQ ID NO: 1291 - DNA, 23 bp, synthetic construct
  misc_feature 1..23: note = Synthetic Polynucleotide
  source 1..23: mol_type = other DNA
cgcccaygttccccgcaggccgg

SEQ ID NO: 1292 - DNA, 23 bp, synthetic construct
  misc_feature 1..23: note = Synthetic Polynucleotide
  source 1..23: mol_type = other DNA
tccygctggccctcgcggcctgg

SEQ ID NO: 1293 - DNA, 23 bp, synthetic construct
  misc_feature 1..23: note = Synthetic Polynucleotide
  source 1..23: mol_type = other DNA
cctcatcytcaaggccgccgtgg

SEQ ID NO: 1294 - DNA, 23 bp, synthetic construct
  misc_feature 1..23: note = Synthetic Polynucleotide
  source 1..23: mol_type = other DNA
tcggcygcaccccaagttcgtgg

SEQ ID NO: 1295 - DNA, 23 bp, synthetic construct
  misc_feature 1..23: note = Synthetic Polynucleotide
  source 1..23: mol_type = other DNA
aggacctygctgggaaacaatgg

SEQ ID NO: 1296 - DNA, 23 bp, synthetic construct
  misc_feature 1..23: note = Synthetic Polynucleotide
  source 1..23: mol_type = other DNA
acctygctgggaaacaatggtgg

SEQ ID NO: 1297 - DNA, 23 bp, synthetic construct
  misc_feature 1..23: note = Synthetic Polynucleotide
  source 1..23: mol_type = other DNA
cctygctgggaaacaatggtggg

SEQ ID NO: 1298 - DNA, 23 bp, synthetic construct
  misc_feature 1..23: note = Synthetic Polynucleotide
  source 1..23: mol_type = other DNA
ggaggctyacgatgagtgcctgg

SEQ ID NO: 1299 - DNA, 23 bp, synthetic construct
  misc_feature 1..23: note = Synthetic Polynucleotide
  source 1..23: mol_type = other DNA
ggctyacgatgagtgcctggagg

SEQ ID NO: 1300 - DNA, 23 bp, synthetic construct
  misc_feature 1..23: note = Synthetic Polynucleotide
  source 1..23: mol_type = other DNA
ggtgcctytgacgagcacatagg

SEQ ID NO: 1301 - DNA, 23 bp, synthetic construct
  misc_feature 1..23: note = Synthetic Polynucleotide
  source 1..23: mol_type = other DNA
ggcgctaygagttctttcgaggg

SEQ ID NO: 1302 - DNA, 23 bp, synthetic construct
  misc_feature 1..23: note = Synthetic Polynucleotide
  source 1..23: mol_type = other DNA
gcgctaygagttctttcgagggg

SEQ ID NO: 1303 - DNA, 23 bp, synthetic construct
  misc_feature 1..23: note = Synthetic Polynucleotide
  source 1..23: mol_type = other DNA
cccccaygacgtgctggctgcgg

SEQ ID NO: 1304 - DNA, 23 bp, synthetic construct
  misc_feature 1..23: note = Synthetic Polynucleotide
  source 1..23: mol_type = other DNA
ccccaygacgtgctggctgcggg

SEQ ID NO: 1305 - DNA, 23 bp, synthetic construct
  misc_feature 1..23: note = Synthetic Polynucleotide
  source 1..23: mol_type = other DNA
cccaygacgtgctggctgcgggg

SEQ ID NO: 1306 - DNA, 23 bp, synthetic construct
  misc_feature 1..23: note = Synthetic Polynucleotide
  source 1..23: mol_type = other DNA
gcagccyggagcatgggctgtgg

SEQ ID NO: 1307 - DNA, 23 bp, synthetic construct
  misc_feature 1..23: note = Synthetic Polynucleotide
  source 1..23: mol_type = other DNA
ctcacctycaacatcactgcggg

SEQ ID NO: 1308 - DNA, 23 bp, synthetic construct
  misc_feature 1..23: note = Synthetic Polynucleotide
  source 1..23: mol_type = other DNA
cctgtacycgggctcccagaagg

SEQ ID NO: 1309 - DNA, 23 bp, synthetic construct
  misc_feature 1..23: note = Synthetic Polynucleotide
  source 1..23: mol_type = other DNA
cgtgcyggcctcgcgcatggtgg

SEQ ID NO: 1310 - DNA, 23 bp, synthetic construct
  misc_feature 1..23: note = Synthetic Polynucleotide
  source 1..23: mol_type = other DNA
tattcagyctaaaagcagcaagg

SEQ ID NO: 1311 - DNA, 23 bp, synthetic construct
  misc_feature 1..23: note = Synthetic Polynucleotide
  source 1..23: mol_type = other DNA
cctgcyggccaactccaaagtgg

SEQ ID NO: 1312 - DNA, 23 bp, synthetic construct
  misc_feature 1..23: note = Synthetic Polynucleotide
  source 1..23: mol_type = other DNA
tgcytcttcaactaaaatacagg

SEQ ID NO: 1313 - DNA, 23 bp, synthetic construct
  misc_feature 1..23: note = Synthetic Polynucleotide
  source 1..23: mol_type = other DNA
aaaatcygtgccaagcaaccagg

SEQ ID NO: 1314 - DNA, 23 bp, synthetic construct
  misc_feature 1..23: note = Synthetic Polynucleotide
  source 1..23: mol_type = other DNA
aaatcygtgccaagcaaccaggg

SEQ ID NO: 1315 - DNA, 23 bp, synthetic construct
  misc_feature 1..23: note = Synthetic Polynucleotide
  source 1..23: mol_type = other DNA
aatcygtgccaagcaaccagggg

SEQ ID NO: 1316 - DNA, 23 bp, synthetic construct
  misc_feature 1..23: note = Synthetic Polynucleotide
  source 1..23: mol_type = other DNA
caagttcyccgaggtgagtccgg

SEQ ID NO: 1317 - DNA, 23 bp, synthetic construct
  misc_feature 1..23: note = Synthetic Polynucleotide
  source 1..23: mol_type = other DNA
aagttcyccgaggtgagtccggg

SEQ ID NO: 1318 - DNA, 23 bp, synthetic construct
  misc_feature 1..23: note = Synthetic Polynucleotide
  source 1..23: mol_type = other DNA
agttcyccgaggtgagtccgggg

SEQ ID NO: 1319 - DNA, 23 bp, synthetic construct
  misc_feature 1..23: note = Synthetic Polynucleotide
  source 1..23: mol_type = other DNA
agcctytggagtgataccacagg

SEQ ID NO: 1320 - DNA, 23 bp, synthetic construct
  misc_feature 1..23: note = Synthetic Polynucleotide
  source 1..23: mol_type = other DNA
ctttgtcyatggtgagtctgggg

SEQ ID NO: 1321 - DNA, 23 bp, synthetic construct
  misc_feature 1..23: note = Synthetic Polynucleotide
  source 1..23: mol_type = other DNA
ggagcygccctcgccagggaagg

SEQ ID NO: 1322 - DNA, 23 bp, synthetic construct
  misc_feature 1..23: note = Synthetic Polynucleotide
  source 1..23: mol_type = other DNA
gcacytgtgatcaacatgcgagg

SEQ ID NO: 1323 - DNA, 23 bp, synthetic construct
  misc_feature 1..23: note = Synthetic Polynucleotide
  source 1..23: mol_type = other DNA
cactcycgctcattcactcccgg

SEQ ID NO: 1324 - DNA, 23 bp, synthetic construct
  misc_feature 1..23: note = Synthetic Polynucleotide
  source 1..23: mol_type = other DNA
ggacygtggctgccctctcaagg

SEQ ID NO: 1325 - DNA, 23 bp, synthetic construct
  misc_feature 1..23: note = Synthetic Polynucleotide
  source 1..23: mol_type = other DNA
agayggcgggatccaggcaaagg

SEQ ID NO: 1326 - DNA, 23 bp, synthetic construct
  misc_feature 1..23: note = Synthetic Polynucleotide
  source 1..23: mol_type = other DNA
caaccyggccctcagctactcgg

SEQ ID NO: 1327 - DNA, 23 bp, synthetic construct
  misc_feature 1..23: note = Synthetic Polynucleotide
  source 1..23: mol_type = other DNA
ttctycggcttagaggtgactgg

SEQ ID NO: 1328 - DNA, 23 bp, synthetic construct
  misc_feature 1..23: note = Synthetic Polynucleotide
  source 1..23: mol_type = other DNA
aaccycatctccctggtgagagg

SEQ ID NO: 1329 - DNA, 23 bp, synthetic construct
  misc_feature 1..23: note = Synthetic Polynucleotide
  source 1..23: mol_type = other DNA
cgagcytcgcgtggctcccgagg

SEQ ID NO: 1330 - DNA, 23 bp, synthetic construct
  misc_feature 1..23: note = Synthetic Polynucleotide
  source 1..23: mol_type = other DNA
tgggtgyccaataagaccgaagg

SEQ ID NO: 1331 - DNA, 23 bp, synthetic construct
  misc_feature 1..23: note = Synthetic Polynucleotide
  source 1..23: mol_type = other DNA
tatgtyctcctacgtcatgctgg

SEQ ID NO: 1332 - DNA, 23 bp, synthetic construct
  misc_feature 1..23: note = Synthetic Polynucleotide
  source 1..23: mol_type = other DNA
ctattgcytccaaacatttttgg

SEQ ID NO: 1333 - DNA, 23 bp, synthetic construct
  misc_feature 1..23: note = Synthetic Polynucleotide
  source 1..23: mol_type = other DNA
ttcacytctaatggtgattatgg

SEQ ID NO: 1334 - DNA, 23 bp, synthetic construct
  misc_feature 1..23: note = Synthetic Polynucleotide
  source 1..23: mol_type = other DNA
tcacytctaatggtgattatggg

SEQ ID NO: 1335 - DNA, 23 bp, synthetic construct
  misc_feature 1..23: note = Synthetic Polynucleotide
  source 1..23: mol_type = other DNA
catcaytggccgcacactggtgg

SEQ ID NO: 1336 - DNA, 23 bp, synthetic construct
  misc_feature 1..23: note = Synthetic Polynucleotide
  source 1..23: mol_type = other DNA
cgttyggcttgtggtgtaattgg

SEQ ID NO: 1337 - DNA, 23 bp, synthetic construct
  misc_feature 1..23: note = Synthetic Polynucleotide
  source 1..23: mol_type = other DNA
gttyggcttgtggtgtaattggg

SEQ ID NO: 1338 - DNA, 23 bp, synthetic construct
  misc_feature 1..23: note = Synthetic Polynucleotide
  source 1..23: mol_type = other DNA
ggccagygtgtgtgtgagcctgg

SEQ ID NO: 1339 - DNA, 23 bp, synthetic construct
  misc_feature 1..23: note = Synthetic Polynucleotide
  source 1..23: mol_type = other DNA
cctcaacygcgagcagtgtcagg

SEQ ID NO: 1340 - DNA, 23 bp, synthetic construct
  misc_feature 1..23: note = Synthetic Polynucleotide
  source 1..23: mol_type = other DNA
ggccaygggctacccggaggtgg

SEQ ID NO: 1341 - DNA, 23 bp, synthetic construct
  misc_feature 1..23: note = Synthetic Polynucleotide
  source 1..23: mol_type = other DNA
gttgcyggcgcgcctcgcagtgg

SEQ ID NO: 1342 - DNA, 23 bp, synthetic construct
  misc_feature 1..23: note = Synthetic Polynucleotide
  source 1..23: mol_type = other DNA
tggcygtcagttgcaaaaaaagg

SEQ ID NO: 1343 - DNA, 23 bp, synthetic construct
  misc_feature 1..23: note = Synthetic Polynucleotide
  source 1..23: mol_type = other DNA
atgcyggagttcagtttgtttgg

SEQ ID NO: 1344 - DNA, 23 bp, synthetic construct
  misc_feature 1..23: note = Synthetic Polynucleotide
  source 1..23: mol_type = other DNA
gagtttcycatctacgaaagagg

SEQ ID NO: 1345 - DNA, 23 bp, synthetic construct
  misc_feature 1..23: note = Synthetic Polynucleotide
  source 1..23: mol_type = other DNA
ctgccyctgatgagatcaagagg

SEQ ID NO: 1346 - DNA, 23 bp, synthetic construct
  misc_feature 1..23: note = Synthetic Polynucleotide
  source 1..23: mol_type = other DNA
catccycaccatcatcacactgg

SEQ ID NO: 1347 - DNA, 23 bp, synthetic construct
  misc_feature 1..23: note = Synthetic Polynucleotide
  source 1..23: mol_type = other DNA
aggtcaygtgcttccacccctgg

SEQ ID NO: 1348 - DNA, 23 bp, synthetic construct
  misc_feature 1..23: note = Synthetic Polynucleotide
  source 1..23: mol_type = other DNA
caggagcyactcaggaaggtggg

SEQ ID NO: 1349 - DNA, 23 bp, synthetic construct
  misc_feature 1..23: note = Synthetic Polynucleotide
  source 1..23: mol_type = other DNA
gcgctyggccgcgcgccttgagg

SEQ ID NO: 1350 - DNA, 23 bp, synthetic construct
  misc_feature 1..23: note = Synthetic Polynucleotide
  source 1..23: mol_type = other DNA
aacyggcactgggtcgcttttgg

SEQ ID NO: 1351 - DNA, 23 bp, synthetic construct
  misc_feature 1..23: note = Synthetic Polynucleotide
  source 1..23: mol_type = other DNA
acacygttcaggtattgggatgg

SEQ ID NO: 1352 - DNA, 23 bp, synthetic construct
  misc_feature 1..23: note = Synthetic Polynucleotide
  source 1..23: mol_type = other DNA
cgccygaccacgccgaccacagg

SEQ ID NO: 1353 - DNA, 23 bp, synthetic construct
  misc_feature 1..23: note = Synthetic Polynucleotide
  source 1..23: mol_type = other DNA
gccygaccacgccgaccacaggg

SEQ ID NO: 1354 - DNA, 23 bp, synthetic construct
  misc_feature 1..23: note = Synthetic Polynucleotide
  source 1..23: mol_type = other DNA
tccygcgctctgccactgtccgg

SEQ ID NO: 1355 - DNA, 23 bp, synthetic construct
  misc_feature 1..23: note = Synthetic Polynucleotide
  source 1..23: mol_type = other DNA
gggaaccygctgctcaccaccgg

SEQ ID NO: 1356 - DNA, 23 bp, synthetic construct
  misc_feature 1..23: note = Synthetic Polynucleotide
  source 1..23: mol_type = other DNA
aaccygctgctcaccaccggtgg

SEQ ID NO: 1357 - DNA, 23 bp, synthetic construct
  misc_feature 1..23: note = Synthetic Polynucleotide
  source 1..23: mol_type = other DNA
gggycactcaagggacagcccgg

SEQ ID NO: 1358 - DNA, 23 bp, synthetic construct
  misc_feature 1..23: note = Synthetic Polynucleotide
  source 1..23: mol_type = other DNA
ggaccygcctgtggatgcagtgg

SEQ ID NO: 1359 - DNA, 23 bp, synthetic construct
  misc_feature 1..23: note = Synthetic Polynucleotide
  source 1..23: mol_type = other DNA
ctaccyggacggcaggtgtgtgg

SEQ ID NO: 1360 - DNA, 23 bp, synthetic construct
  misc_feature 1..23: note = Synthetic Polynucleotide
  source 1..23: mol_type = other DNA
ggaacacygtccattggcatggg

SEQ ID NO: 1361 - DNA, 23 bp, synthetic construct
  misc_feature 1..23: note = Synthetic Polynucleotide
  source 1..23: mol_type = other DNA
gaacacygtccattggcatgggg

SEQ ID NO: 1362 - DNA, 23 bp, synthetic construct
  misc_feature 1..23: note = Synthetic Polynucleotide
  source 1..23: mol_type = other DNA
gctccygctgctctccgacacgg

SEQ ID NO: 1363 - DNA, 23 bp, synthetic construct
  misc_feature 1..23: note = Synthetic Polynucleotide
  source 1..23: mol_type = other DNA
ttcacaygtctgtgcatgccagg

SEQ ID NO: 1364 - DNA, 23 bp, synthetic construct
  misc_feature 1..23: note = Synthetic Polynucleotide
  source 1..23: mol_type = other DNA
atcattcytttgggaagtggagg

SEQ ID NO: 1365 - DNA, 23 bp, synthetic construct
  misc_feature 1..23: note = Synthetic Polynucleotide
  source 1..23: mol_type = other DNA
tcattcytttgggaagtggaggg

SEQ ID NO: 1366 - DNA, 23 bp, synthetic construct
  misc_feature 1..23: note = Synthetic Polynucleotide
  source 1..23: mol_type = other DNA
aactccaygtataagctgacagg

SEQ ID NO: 1367 - DNA, 23 bp, synthetic construct
  misc_feature 1..23: note = Synthetic Polynucleotide
  source 1..23: mol_type = other DNA
catcatgyccatcctggaagagg

SEQ ID NO: 1368 - DNA, 23 bp, synthetic construct
  misc_feature 1..23: note = Synthetic Polynucleotide
  source 1..23: mol_type = other DNA
gtagtctytcatgagaggagtgg

SEQ ID NO: 1369 - DNA, 23 bp, synthetic construct
  misc_feature 1..23: note = Synthetic Polynucleotide
  source 1..23: mol_type = other DNA
gctcaygagggcacagagcatgg

SEQ ID NO: 1370 - DNA, 23 bp, synthetic construct
  misc_feature 1..23: note = Synthetic Polynucleotide
  source 1..23: mol_type = other DNA
atgcaaayatctgtctgaaacgg

SEQ ID NO: 1371 - DNA, 23 bp, synthetic construct
  misc_feature 1..23: note = Synthetic Polynucleotide
  source 1..23: mol_type = other DNA
agcaytgcaaccacattgtcagg

SEQ ID NO: 1372 - DNA, 23 bp, synthetic construct
  misc_feature 1..23: note = Synthetic Polynucleotide
  source 1..23: mol_type = other DNA
tgcccyccacctggggtcacagg

SEQ ID NO: 1373 - DNA, 23 bp, synthetic construct
  misc_feature 1..23: note = Synthetic Polynucleotide
  source 1..23: mol_type = other DNA
ctggggcyggtattcatgaaagg

SEQ ID NO: 1374 - DNA, 23 bp, synthetic construct
  misc_feature 1..23: note = Synthetic Polynucleotide
  source 1..23: mol_type = other DNA
gtaatcygcaaaggaggagaagg

SEQ ID NO: 1375 - DNA, 23 bp, synthetic construct
  misc_feature 1..23: note = Synthetic Polynucleotide
  source 1..23: mol_type = other DNA
taatcygcaaaggaggagaaggg

SEQ ID NO: 1376 - DNA, 23 bp, synthetic construct
  misc_feature 1..23: note = Synthetic Polynucleotide
  source 1..23: mol_type = other DNA
cccyacccaacgctgccgcctgg

SEQ ID NO: 1377 - DNA, 23 bp, synthetic construct
  misc_feature 1..23: note = Synthetic Polynucleotide
  source 1..23: mol_type = other DNA
caatcyacttctcccgccgccgg

SEQ ID NO: 1378 - DNA, 23 bp, synthetic construct
  misc_feature 1..23: note = Synthetic Polynucleotide
  source 1..23: mol_type = other DNA
aatcyacttctcccgccgccggg

SEQ ID NO: 1379 - DNA, 23 bp, synthetic construct
  misc_feature 1..23: note = Synthetic Polynucleotide
  source 1..23: mol_type = other DNA
ctgccagygcctgctgaagaagg

SEQ ID NO: 1380 - DNA, 23 bp, synthetic construct
  misc_feature 1..23: note = Synthetic Polynucleotide
  source 1..23: mol_type = other DNA
ccagygcctgctgaagaaggagg

SEQ ID NO: 1381 - DNA, 23 bp, synthetic construct
  misc_feature 1..23: note = Synthetic Polynucleotide
  source 1..23: mol_type = other DNA
aaactggyccttatacctgttgg

SEQ ID NO: 1382 - DNA, 23 bp, synthetic construct
  misc_feature 1..23: note = Synthetic Polynucleotide
  source 1..23: mol_type = other DNA
aactggyccttatacctgttggg

SEQ ID NO: 1383 - DNA, 23 bp, synthetic construct
  misc_feature 1..23: note = Synthetic Polynucleotide
  source 1..23: mol_type = other DNA
cctytaaccgcagcatccatcgg

SEQ ID NO: 1384 - DNA, 23 bp, synthetic construct
  misc_feature 1..23: note = Synthetic Polynucleotide
  source 1..23: mol_type = other DNA
ggtctctygcggtgtggaaaggg

SEQ ID NO: 1385 - DNA, 23 bp, synthetic construct
  misc_feature 1..23: note = Synthetic Polynucleotide
  source 1..23: mol_type = other DNA
ttaycccatctcagtaaccgtgg

SEQ ID NO: 1386 - DNA, 23 bp, synthetic construct
  misc_feature 1..23: note = Synthetic Polynucleotide
  source 1..23: mol_type = other DNA
ttgcygaaggagctgagatgagg

SEQ ID NO: 1387 - DNA, 23 bp, synthetic construct
  misc_feature 1..23: note = Synthetic Polynucleotide
  source 1..23: mol_type = other DNA
ggcaytccgagtctttgacaagg

SEQ ID NO: 1388 - DNA, 23 bp, synthetic construct
  misc_feature 1..23: note = Synthetic Polynucleotide
  source 1..23: mol_type = other DNA
taatccayaatttgtcatcctgg

SEQ ID NO: 1389 - DNA, 23 bp, synthetic construct
  misc_feature 1..23: note = Synthetic Polynucleotide
  source 1..23: mol_type = other DNA
gctytgctttggatggacaatgg

SEQ ID NO: 1390 - DNA, 23 bp, synthetic construct
  misc_feature 1..23: note = Synthetic Polynucleotide
  source 1..23: mol_type = other DNA
tcactcaygttcatgcaatgggg

SEQ ID NO: 1391 - DNA, 23 bp, synthetic construct
  misc_feature 1..23: note = Synthetic Polynucleotide
  source 1..23: mol_type = other DNA
gcaggacygccccattgcctggg

SEQ ID NO: 1392 - DNA, 23 bp, synthetic construct
  misc_feature 1..23: note = Synthetic Polynucleotide
  source 1..23: mol_type = other DNA
tatggyccaagatcgaacgcagg

SEQ ID NO: 1393 - DNA, 23 bp, synthetic construct
  misc_feature 1..23: note = Synthetic Polynucleotide
  source 1..23: mol_type = other DNA
gcccgacygcgggatgctggtgg

SEQ ID NO: 1394 - DNA, 23 bp, synthetic construct
  misc_feature 1..23: note = Synthetic Polynucleotide
  source 1..23: mol_type = other DNA
aaggcyacatgaactaaccaagg

SEQ ID NO: 1395 - DNA, 23 bp, synthetic construct
  misc_feature 1..23: note = Synthetic Polynucleotide
  source 1..23: mol_type = other DNA
caggcgycctcttgctcagccgg

SEQ ID NO: 1396 - DNA, 23 bp, synthetic construct
  misc_feature 1..23: note = Synthetic Polynucleotide
  source 1..23: mol_type = other DNA
cggagtcygttctccagggcagg

SEQ ID NO: 1397 - DNA, 23 bp, synthetic construct
  misc_feature 1..23: note = Synthetic Polynucleotide
  source 1..23: mol_type = other DNA
ctgcyacctagagttgcgctcgg

SEQ ID NO: 1398 - DNA, 23 bp, synthetic construct
  misc_feature 1..23: note = Synthetic Polynucleotide
  source 1..23: mol_type = other DNA
acggctcycatcaactccactgg

SEQ ID NO: 1399 - DNA, 23 bp, synthetic construct
  misc_feature 1..23: note = Synthetic Polynucleotide
  source 1..23: mol_type = other DNA
cggctcycatcaactccactggg

SEQ ID NO: 1400 - DNA, 23 bp, synthetic construct
  misc_feature 1..23: note = Synthetic Polynucleotide
  source 1..23: mol_type = other DNA
ggctcycatcaactccactgggg

SEQ ID NO: 1401 - DNA, 23 bp, synthetic construct
  misc_feature 1..23: note = Synthetic Polynucleotide
  source 1..23: mol_type = other DNA
ggtgcygcggatcggcctgctgg

SEQ ID NO: 1402 - DNA, 23 bp, synthetic construct
  misc_feature 1..23: note = Synthetic Polynucleotide
  source 1..23: mol_type = other DNA
gtgcygcggatcggcctgctggg

SEQ ID NO: 1403 - DNA, 23 bp, synthetic construct
  misc_feature 1..23: note = Synthetic Polynucleotide
  source 1..23: mol_type = other DNA
gtgcygctgttcttaacccacgg

SEQ ID NO: 1404 - DNA, 23 bp, synthetic construct
  misc_feature 1..23: note = Synthetic Polynucleotide
  source 1..23: mol_type = other DNA
tgcygctgttcttaacccacggg

SEQ ID NO: 1405 - DNA, 23 bp, synthetic construct
  misc_feature 1..23: note = Synthetic Polynucleotide
  source 1..23: mol_type = other DNA
gctcatcyccttcagtgacaagg

SEQ ID NO: 1406 - DNA, 23 bp, synthetic construct
  misc_feature 1..23: note = Synthetic Polynucleotide
  source 1..23: mol_type = other DNA
ggggcygtgacgaccagcccagg

SEQ ID NO: 1407 - DNA, 23 bp, synthetic construct
  misc_feature 1..23: note = Synthetic Polynucleotide
  source 1..23: mol_type = other DNA
gtatcygcatgggcgcctgcagg

SEQ ID NO: 1408 - DNA, 23 bp, synthetic construct
  misc_feature 1..23: note = Synthetic Polynucleotide
  source 1..23: mol_type = other DNA
gaaatcayaggacaagcctttgg

SEQ ID NO: 1409 - DNA, 23 bp, synthetic construct
  misc_feature 1..23: note = Synthetic Polynucleotide
  source 1..23: mol_type = other DNA
gagccyccagagcttgttgaagg

SEQ ID NO: 1410 - DNA, 23 bp, synthetic construct
  misc_feature 1..23: note = Synthetic Polynucleotide
  source 1..23: mol_type = other DNA
attgtacycagagcactagaagg

SEQ ID NO: 1411 - DNA, 23 bp, synthetic construct
  misc_feature 1..23: note = Synthetic Polynucleotide
  source 1..23: mol_type = other DNA
aggyaacccttaatactacctgg

SEQ ID NO: 1412 - DNA, 23 bp, synthetic construct
  misc_feature 1..23: note = Synthetic Polynucleotide
  source 1..23: mol_type = other DNA
gaacggygcgcggacccgggcgg

SEQ ID NO: 1413 - DNA, 23 bp, synthetic construct
  misc_feature 1..23: note = Synthetic Polynucleotide
  source 1..23: mol_type = other DNA
aacggygcgcggacccgggcggg

SEQ ID NO: 1414 - DNA, 23 bp, synthetic construct
  misc_feature 1..23: note = Synthetic Polynucleotide
  source 1..23: mol_type = other DNA
acttcygtgagaacaagctcagg

SEQ ID NO: 1415 - DNA, 23 bp, synthetic construct
  misc_feature 1..23: note = Synthetic Polynucleotide
  source 1..23: mol_type = other DNA
caagctytgataccttcagttgg

SEQ ID NO: 1416 - DNA, 23 bp, synthetic construct
  misc_feature 1..23: note = Synthetic Polynucleotide
  source 1..23: mol_type = other DNA
aagctytgataccttcagttggg

SEQ ID NO: 1417 - DNA, 23 bp, synthetic construct
  misc_feature 1..23: note = Synthetic Polynucleotide
  source 1..23: mol_type = other DNA
cctccaygactttttcaaaaagg

SEQ ID NO: 1418 - DNA, 23 bp, synthetic construct
  misc_feature 1..23: note = Synthetic Polynucleotide
  source 1..23: mol_type = other DNA
cgtcygatcaaaggcgccaaagg

SEQ ID NO: 1419 - DNA, 23 bp, synthetic construct
  misc_feature 1..23: note = Synthetic Polynucleotide
  source 1..23: mol_type = other DNA
gtcygatcaaaggcgccaaaggg

SEQ ID NO: 1420 - DNA, 23 bp, synthetic construct
  misc_feature 1..23: note = Synthetic Polynucleotide
  source 1..23: mol_type = other DNA
tactaccyggaccaggtgggtgg

SEQ ID NO: 1421 - DNA, 23 bp, synthetic construct
  misc_feature 1..23: note = Synthetic Polynucleotide
  source 1..23: mol_type = other DNA
actaccyggaccaggtgggtggg

SEQ ID NO: 1422 - DNA, 23 bp, synthetic construct
  misc_feature 1..23: note = Synthetic Polynucleotide
  source 1..23: mol_type = other DNA
ctaccyggaccaggtgggtgggg

SEQ ID NO: 1423 - DNA, 23 bp, synthetic construct
  misc_feature 1..23: note = Synthetic Polynucleotide
  source 1..23: mol_type = other DNA
aggcaytggggacgagatcgagg

SEQ ID NO: 1424 - DNA, 23 bp, synthetic construct
  misc_feature 1..23: note = Synthetic Polynucleotide
  source 1..23: mol_type = other DNA
gtacgtgyctgtgaacggcaagg

SEQ ID NO: 1425 - DNA, 23 bp, synthetic construct
  misc_feature 1..23: note = Synthetic Polynucleotide
  source 1..23: mol_type = other DNA
tacgtgyctgtgaacggcaaggg

SEQ ID NO: 1426 - DNA, 23 bp, synthetic construct
  misc_feature 1..23: note = Synthetic Polynucleotide
  source 1..23: mol_type = other DNA
ccgccygcctgtgaagtggatgg

SEQ ID NO: 1427 - DNA, 23 bp, synthetic construct
  misc_feature 1..23: note = Synthetic Polynucleotide
  source 1..23: mol_type = other DNA
gaatcccyaccctggcatcctgg

SEQ ID NO: 1428 - DNA, 23 bp, synthetic construct
  misc_feature 1..23: note = Synthetic Polynucleotide
  source 1..23: mol_type = other DNA
ggagactyccgctactcagatgg

SEQ ID NO: 1429 - DNA, 23 bp, synthetic construct
  misc_feature 1..23: note = Synthetic Polynucleotide
  source 1..23: mol_type = other DNA
gagactyccgctactcagatggg

SEQ ID NO: 1430 - DNA, 23 bp, synthetic construct
  misc_feature 1..23: note = Synthetic Polynucleotide
  source 1..23: mol_type = other DNA
agccygtacccatggaggtaagg

SEQ ID NO: 1431 - DNA, 23 bp, synthetic construct
  misc_feature 1..23: note = Synthetic Polynucleotide
  source 1..23: mol_type = other DNA
gccygtacccatggaggtaaggg

SEQ ID NO: 1432 - DNA, 23 bp, synthetic construct
  misc_feature 1..23: note = Synthetic Polynucleotide
  source 1..23: mol_type = other DNA
gcagayctgctccttccttcagg

SEQ ID NO: 1433 - DNA, 23 bp, synthetic construct
  misc_feature 1..23: note = Synthetic Polynucleotide
  source 1..23: mol_type = other DNA
ggccacaygtgtcaatgtggtgg

SEQ ID NO: 1434 - DNA, 23 bp, synthetic construct
  misc_feature 1..23: note = Synthetic Polynucleotide
  source 1..23: mol_type = other DNA
gccacaygtgtcaatgtggtggg

SEQ ID NO: 1435 - DNA, 23 bp, synthetic construct
  misc_feature 1..23: note = Synthetic Polynucleotide
  source 1..23: mol_type = other DNA
atggcacygccagtgcaaacagg

SEQ ID NO: 1436 - DNA, 23 bp, synthetic construct
  misc_feature 1..23: note = Synthetic Polynucleotide
  source 1..23: mol_type = other DNA
tgcyctccaagcagcactaccgg

SEQ ID NO: 1437 - DNA, 23 bp, synthetic construct
  misc_feature 1..23: note = Synthetic Polynucleotide
  source 1..23: mol_type = other DNA
ggaccyggcgcgggagccgctgg

SEQ ID NO: 1438 - DNA, 23 bp, synthetic construct
  misc_feature 1..23: note = Synthetic Polynucleotide
  source 1..23: mol_type = other DNA
tttcytctggctagaattgctgg

SEQ ID NO: 1439 - DNA, 23 bp, synthetic construct
  misc_feature 1..23: note = Synthetic Polynucleotide
  source 1..23: mol_type = other DNA
tggacyatggtgagacctccagg

SEQ ID NO: 1440 - DNA, 23 bp, synthetic construct
  misc_feature 1..23: note = Synthetic Polynucleotide
  source 1..23: mol_type = other DNA
caaaggcytcttcttgctggtgg

SEQ ID NO: 1441 - DNA, 23 bp, synthetic construct
  misc_feature 1..23: note = Synthetic Polynucleotide
  source 1..23: mol_type = other DNA
ggcytcttcttgctggtggaagg

SEQ ID NO: 1442 - DNA, 23 bp, synthetic construct
  misc_feature 1..23: note = Synthetic Polynucleotide
  source 1..23: mol_type = other DNA
ccccyactcctattccaccacgg

SEQ ID NO: 1443 - DNA, 23 bp, synthetic construct
  misc_feature 1..23: note = Synthetic Polynucleotide
  source 1..23: mol_type = other DNA
gaagcygccgaagtccctgtcgg

SEQ ID NO: 1444 - DNA, 23 bp, synthetic construct
  misc_feature 1..23: note = Synthetic Polynucleotide
  source 1..23: mol_type = other DNA
ccagygccttccaccaagccagg

SEQ ID NO: 1445 - DNA, 23 bp, synthetic construct
  misc_feature 1..23: note = Synthetic Polynucleotide
  source 1..23: mol_type = other DNA
ggagtycattttggtggacaagg

SEQ ID NO: 1446 - DNA, 23 bp, synthetic construct
  misc_feature 1..23: note = Synthetic Polynucleotide
  source 1..23: mol_type = other DNA
accaagcygctggatcccgaagg

SEQ ID NO: 1447 - DNA, 23 bp, synthetic construct
  misc_feature 1..23: note = Synthetic Polynucleotide
  source 1..23: mol_type = other DNA
aagcygctggatcccgaaggtgg

SEQ ID NO: 1448 - DNA, 23 bp, synthetic construct
  misc_feature 1..23: note = Synthetic Polynucleotide
  source 1..23: mol_type = other DNA
agcygctggatcccgaaggtggg

SEQ ID NO: 1449 - DNA, 23 bp, synthetic construct
  misc_feature 1..23: note = Synthetic Polynucleotide
  source 1..23: mol_type = other DNA
aatgccyccacagtggtcggagg

SEQ ID NO: 1450 - DNA, 23 bp, synthetic construct
  misc_feature 1..23: note = Synthetic Polynucleotide
  source 1..23: mol_type = other DNA
gtggagcyggtagctaaagaagg

SEQ ID NO: 1451 - DNA, 23 bp, synthetic construct
  misc_feature 1..23: note = Synthetic Polynucleotide
  source 1..23: mol_type = other DNA
tggagcyggtagctaaagaaggg

SEQ ID NO: 1452 - DNA, 23 bp, synthetic construct
  misc_feature 1..23: note = Synthetic Polynucleotide
  source 1..23: mol_type = other DNA
ctccagcyggaaggatggcttgg

SEQ ID NO: 1453 - DNA, 23 bp, synthetic construct
  misc_feature 1..23: note = Synthetic Polynucleotide
  source 1..23: mol_type = other DNA
atgccyctgtggctgaggcgtgg

SEQ ID NO: 1454 - DNA, 23 bp, synthetic construct
  misc_feature 1..23: note = Synthetic Polynucleotide
  source 1..23: mol_type = other DNA
tgaggccygtggcctgctcctgg

SEQ ID NO: 1455 - DNA, 23 bp, synthetic construct
  misc_feature 1..23: note = Synthetic Polynucleotide
  source 1..23: mol_type = other DNA
gaggccygtggcctgctcctggg

SEQ ID NO: 1456 - DNA, 23 bp, synthetic construct
  misc_feature 1..23: note = Synthetic Polynucleotide
  source 1..23: mol_type = other DNA
cagcyatggccaggccccagtgg

SEQ ID NO: 1457 - DNA, 23 bp, synthetic construct
  misc_feature 1..23: note = Synthetic Polynucleotide
  source 1..23: mol_type = other DNA
caggyaacatctgtcccagcagg

SEQ ID NO: 1458 - DNA, 23 bp, synthetic construct
  misc_feature 1..23: note = Synthetic Polynucleotide
  source 1..23: mol_type = other DNA
aggyaacatctgtcccagcaggg

SEQ ID NO: 1459 - DNA, 23 bp, synthetic construct
  misc_feature 1..23: note = Synthetic Polynucleotide
  source 1..23: mol_type = other DNA
gagacygaagggccaggtggagg

SEQ ID NO: 1460 - DNA, 23 bp, synthetic construct
  misc_feature 1..23: note = Synthetic Polynucleotide
  source 1..23: mol_type = other DNA
gatgcyggcagggtcctggctgg

SEQ ID NO: 1461 - DNA, 23 bp, synthetic construct
  misc_feature 1..23: note = Synthetic Polynucleotide
  source 1..23: mol_type = other DNA
atgcyggcagggtcctggctggg

SEQ ID NO: 1462 - DNA, 23 bp, synthetic construct
  misc_feature 1..23: note = Synthetic Polynucleotide
  source 1..23: mol_type = other DNA
tgcyggcagggtcctggctgggg

SEQ ID NO: 1463 - DNA, 23 bp, synthetic construct
  misc_feature 1..23: note = Synthetic Polynucleotide
  source 1..23: mol_type = other DNA
ctacyggaccgactctgtcctgg

SEQ ID NO: 1464 - DNA, 23 bp, synthetic construct
  misc_feature 1..23: note = Synthetic Polynucleotide
  source 1..23: mol_type = other DNA
tacyggaccgactctgtcctggg

SEQ ID NO: 1465 - DNA, 23 bp, synthetic construct
  misc_feature 1..23: note = Synthetic Polynucleotide
  source 1..23: mol_type = other DNA
ggcgcttycggggggcctcaggg

SEQ ID NO: 1466 - DNA, 23 bp, synthetic construct
  misc_feature 1..23: note = Synthetic Polynucleotide
  source 1..23: mol_type = other DNA
aaggyaccgcgggcctcgcgcgg

SEQ ID NO: 1467 - DNA, 23 bp, synthetic construct
  misc_feature 1..23: note = Synthetic Polynucleotide
  source 1..23: mol_type = other DNA
aggyaccgcgggcctcgcgcggg

SEQ ID NO: 1468 - DNA, 23 bp, synthetic construct
  misc_feature 1..23: note = Synthetic Polynucleotide
  source 1..23: mol_type = other DNA
ttgcaycattggccgcacactgg

SEQ ID NO: 1469 - DNA, 23 bp, synthetic construct
  misc_feature 1..23: note = Synthetic Polynucleotide
  source 1..23: mol_type = other DNA
cgcgcytgcgcttcgcttcctgg

SEQ ID NO: 1470 - DNA, 23 bp, synthetic construct
  misc_feature 1..23: note = Synthetic Polynucleotide
  source 1..23: mol_type = other DNA
agctcygtttcgtgatgttttgg

SEQ ID NO: 1471 - DNA, 23 bp, synthetic construct
  misc_feature 1..23: note = Synthetic Polynucleotide
  source 1..23: mol_type = other DNA
agttacgycaaggtgatgctggg

SEQ ID NO: 1472 - DNA, 23 bp, synthetic construct
  misc_feature 1..23: note = Synthetic Polynucleotide
  source 1..23: mol_type = other DNA
ggtgygcgggggcgtgctcgagg

SEQ ID NO: 1473 - DNA, 23 bp, synthetic construct
  misc_feature 1..23: note = Synthetic Polynucleotide
  source 1..23: mol_type = other DNA
gtgygcgggggcgtgctcgaggg

SEQ ID NO: 1474 - DNA, 23 bp, synthetic construct
  misc_feature 1..23: note = Synthetic Polynucleotide
  source 1..23: mol_type = other DNA
cgccygcgacaagccacagcagg

SEQ ID NO: 1475 - DNA, 23 bp, synthetic construct
  misc_feature 1..23: note = Synthetic Polynucleotide
  source 1..23: mol_type = other DNA
ctgcaccyccaccagagccatgg

SEQ ID NO: 1476 - DNA, 23 bp, synthetic construct
  misc_feature 1..23: note = Synthetic Polynucleotide
  source 1..23: mol_type = other DNA
agagaycgccaacatgtcactgg

SEQ ID NO: 1477 - DNA, 23 bp, synthetic construct
  misc_feature 1..23: note = Synthetic Polynucleotide
  source 1..23: mol_type = other DNA
gctgcyccagatgccctctgtgg

SEQ ID NO: 1478 - DNA, 23 bp, synthetic construct
  misc_feature 1..23: note = Synthetic Polynucleotide
  source 1..23: mol_type = other DNA
aactcctyctacagcagcaaagg

SEQ ID NO: 1479 - DNA, 23 bp, synthetic construct
  misc_feature 1..23: note = Synthetic Polynucleotide
  source 1..23: mol_type = other DNA
gctgccgygcgtggcccgagggg

SEQ ID NO: 1480 - DNA, 23 bp, synthetic construct
  misc_feature 1..23: note = Synthetic Polynucleotide
  source 1..23: mol_type = other DNA
ctgccgygcgtggcccgaggggg

SEQ ID NO: 1481 - DNA, 23 bp, synthetic construct
  misc_feature 1..23: note = Synthetic Polynucleotide
  source 1..23: mol_type = other DNA
caagttcytccacaaggtgaggg

SEQ ID NO: 1482 - DNA, 23 bp, synthetic construct
  misc_feature 1..23: note = Synthetic Polynucleotide
  source 1..23: mol_type = other DNA
ttcytccacaaggtgagggccgg

SEQ ID NO: 1483 - DNA, 23 bp, synthetic construct
  misc_feature 1..23: note = Synthetic Polynucleotide
  source 1..23: mol_type = other DNA
tgggcgcygcatgcgaggagagg

SEQ ID NO: 1484 - DNA, 23 bp, synthetic construct
  misc_feature 1..23: note = Synthetic Polynucleotide
  source 1..23: mol_type = other DNA
cgcygcatgcgaggagaggctgg

SEQ ID NO: 1485 - DNA, 23 bp, synthetic construct
  misc_feature 1..23: note = Synthetic Polynucleotide
  source 1..23: mol_type = other DNA
tatgacyggcggctggagcccgg

SEQ ID NO: 1486 - DNA, 23 bp, synthetic construct
  misc_feature 1..23: note = Synthetic Polynucleotide
  source 1..23: mol_type = other DNA
gaacgagyctgaaatcatcccgg

SEQ ID NO: 1487 - DNA, 23 bp, synthetic construct
  misc_feature 1..23: note = Synthetic Polynucleotide
  source 1..23: mol_type = other DNA
aaaaaacyctacactctggatgg

SEQ ID NO: 1488 - DNA, 23 bp, synthetic construct
  misc_feature 1..23: note = Synthetic Polynucleotide
  source 1..23: mol_type = other DNA
gatccycgttgtggctgcaaagg

SEQ ID NO: 1489 - DNA, 23 bp, synthetic construct
  misc_feature 1..23: note = Synthetic Polynucleotide
  source 1..23: mol_type = other DNA
ccctgcycacctgcctttcctgg

SEQ ID NO: 1490 - DNA, 23 bp, synthetic construct
  misc_feature 1..23: note = Synthetic Polynucleotide
  source 1..23: mol_type = other DNA
ggaayctttaaaaaaagtgaagg

SEQ ID NO: 1491 - DNA, 23 bp, synthetic construct
  misc_feature 1..23: note = Synthetic Polynucleotide
  source 1..23: mol_type = other DNA
atcacggyaagaatggtacatgg

SEQ ID NO: 1492 - DNA, 23 bp, synthetic construct
  misc_feature 1..23: note = Synthetic Polynucleotide
  source 1..23: mol_type = other DNA
tcacggyaagaatggtacatggg

SEQ ID NO: 1493 - DNA, 23 bp, synthetic construct
  misc_feature 1..23: note = Synthetic Polynucleotide
  source 1..23: mol_type = other DNA
ctatcyttctcagggagggaagg

SEQ ID NO: 1494 - DNA, 23 bp, synthetic construct
  misc_feature 1..23: note = Synthetic Polynucleotide
  source 1..23: mol_type = other DNA
gattgacyggaaggcctacatgg

SEQ ID NO: 1495 - DNA, 23 bp, synthetic construct
  misc_feature 1..23: note = Synthetic Polynucleotide
  source 1..23: mol_type = other DNA
ccacyggcattatcgagacctgg

SEQ ID NO: 1496 - DNA, 23 bp, synthetic construct
  misc_feature 1..23: note = Synthetic Polynucleotide
  source 1..23: mol_type = other DNA
gtacctgyactgggctgactggg

SEQ ID NO: 1497 - DNA, 23 bp, synthetic construct
  misc_feature 1..23: note = Synthetic Polynucleotide
  source 1..23: mol_type = other DNA
ttcctygtatcccaatgctaagg

SEQ ID NO: 1498 - DNA, 23 bp, synthetic construct
  misc_feature 1..23: note = Synthetic Polynucleotide
  source 1..23: mol_type = other DNA
acaaaacytcaatgaaacgtggg

SEQ ID NO: 1499 - DNA, 23 bp, synthetic construct
  misc_feature 1..23: note = Synthetic Polynucleotide
  source 1..23: mol_type = other DNA
gctccyagtggccatgcacgtgg

SEQ ID NO: 1500 - DNA, 23 bp, synthetic construct
  misc_feature 1..23: note = Synthetic Polynucleotide
  source 1..23: mol_type = other DNA
aagatcaytggcaattcagtggg

SEQ ID NO: 1501 - DNA, 23 bp, synthetic construct
  misc_feature 1..23: note = Synthetic Polynucleotide
  source 1..23: mol_type = other DNA
agatcaytggcaattcagtgggg

SEQ ID NO: 1502 - DNA, 23 bp, synthetic construct
  misc_feature 1..23: note = Synthetic Polynucleotide
  source 1..23: mol_type = other DNA
gatcaytggcaattcagtggggg

SEQ ID NO: 1503 - DNA, 23 bp, synthetic construct
  misc_feature 1..23: note = Synthetic Polynucleotide
  source 1..23: mol_type = other DNA
cggyaactaactaactataatgg

SEQ ID NO: 1504 - DNA, 23 bp, synthetic construct
  misc_feature 1..23: note = Synthetic Polynucleotide
  source 1..23: mol_type = other DNA
tcccygtgctgctggagttgtgg

SEQ ID NO: 1505 - DNA, 23 bp, synthetic construct
  misc_feature 1..23: note = Synthetic Polynucleotide
  source 1..23: mol_type = other DNA
cccygtgctgctggagttgtggg

SEQ ID NO: 1506 - DNA, 23 bp, synthetic construct
  misc_feature 1..23: note = Synthetic Polynucleotide
  source 1..23: mol_type = other DNA
ccaacyttttactattcagaagg

SEQ ID NO: 1507 - DNA, 23 bp, synthetic construct
  misc_feature 1..23: note = Synthetic Polynucleotide
  source 1..23: mol_type = other DNA
ccgccygcggggataaagccagg

SEQ ID NO: 1508 - DNA, 23 bp, synthetic construct
  misc_feature 1..23: note = Synthetic Polynucleotide
  source 1..23: mol_type = other DNA
cgccygcggggataaagccaggg

SEQ ID NO: 1509 - DNA, 23 bp, synthetic construct
  misc_feature 1..23: note = Synthetic Polynucleotide
  source 1..23: mol_type = other DNA
gaatctycacagccgctctccgg

SEQ ID NO: 1510 - DNA, 23 bp, synthetic construct
  misc_feature 1..23: note = Synthetic Polynucleotide
  source 1..23: mol_type = other DNA
gatgyctgacgggtagcctgtgg

SEQ ID NO: 1511 - DNA, 23 bp, synthetic construct
  misc_feature 1..23: note = Synthetic Polynucleotide
  source 1..23: mol_type = other DNA
atgyctgacgggtagcctgtggg

SEQ ID NO: 1512 - DNA, 23 bp, synthetic construct
  misc_feature 1..23: note = Synthetic Polynucleotide
  source 1..23: mol_type = other DNA
gctccygggcttcgtggccatgg

SEQ ID NO: 1513 - DNA, 23 bp, synthetic construct
  misc_feature 1..23: note = Synthetic Polynucleotide
  source 1..23: mol_type = other DNA
gtcgcyagggctcgtgtcgctgg

SEQ ID NO: 1514 - DNA, 23 bp, synthetic construct
  misc_feature 1..23: note = Synthetic Polynucleotide
  source 1..23: mol_type = other DNA
tcgcyagggctcgtgtcgctggg

SEQ ID NO: 1515 - DNA, 23 bp, synthetic construct
  misc_feature 1..23: note = Synthetic Polynucleotide
  source 1..23: mol_type = other DNA
ggccgacytctccgtgtcggtgg

SEQ ID NO: 1516 - DNA, 23 bp, synthetic construct
  misc_feature 1..23: note = Synthetic Polynucleotide
  source 1..23: mol_type = other DNA
caaccygcagtttggtgagatgg

SEQ ID NO: 1517 - DNA, 23 bp, synthetic construct
  misc_feature 1..23: note = Synthetic Polynucleotide
  source 1..23: mol_type = other DNA
cgccaccyaccgccgcctgctgg

SEQ ID NO: 1518 - DNA, 23 bp, synthetic construct
  misc_feature 1..23: note = Synthetic Polynucleotide
  source 1..23: mol_type = other DNA
caccyaccgccgcctgctggagg

SEQ ID NO: 1519 - DNA, 23 bp, synthetic construct
  misc_feature 1..23: note = Synthetic Polynucleotide
  source 1..23: mol_type = other DNA
accyaccgccgcctgctggaggg

SEQ ID NO: 1520 - DNA, 23 bp, synthetic construct
  misc_feature 1..23: note = Synthetic Polynucleotide
  source 1..23: mol_type = other DNA
ttgaagyctcccgcggtgagcgg

SEQ ID NO: 1521 - DNA, 23 bp, synthetic construct
  misc_feature 1..23: note = Synthetic Polynucleotide
  source 1..23: mol_type = other DNA
aagyctcccgcggtgagcggcgg

SEQ ID NO: 1522 - DNA, 23 bp, synthetic construct
  misc_feature 1..23: note = Synthetic Polynucleotide
  source 1..23: mol_type = other DNA
tggtcygagcttcgacttcgtgg

SEQ ID NO: 1523 - DNA, 23 bp, synthetic construct
  misc_feature 1..23: note = Synthetic Polynucleotide
  source 1..23: mol_type = other DNA
ccacttcytgaaaagtactgtgg

SEQ ID NO: 1524 - DNA, 23 bp, synthetic construct
  misc_feature 1..23: note = Synthetic Polynucleotide
  source 1..23: mol_type = other DNA
gcaaytgcagaaaatgcaaaagg

SEQ ID NO: 1525 - DNA, 23 bp, synthetic construct
  misc_feature 1..23: note = Synthetic Polynucleotide
  source 1..23: mol_type = other DNA
aagatctygaggcatgacattgg

SEQ ID NO: 1526 - DNA, 23 bp, synthetic construct
  misc_feature 1..23: note = Synthetic Polynucleotide
  source 1..23: mol_type = other DNA
gacycacagagcccaatttctgg

SEQ ID NO: 1527 - DNA, 23 bp, synthetic construct
  misc_feature 1..23: note = Synthetic Polynucleotide
  source 1..23: mol_type = other DNA
tccccatygtcctcagggatggg

SEQ ID NO: 1528 - DNA, 23 bp, synthetic construct
  misc_feature 1..23: note = Synthetic Polynucleotide
  source 1..23: mol_type = other DNA
caacytactgagggctttgaagg

SEQ ID NO: 1529 - DNA, 23 bp, synthetic construct
  misc_feature 1..23: note = Synthetic Polynucleotide
  source 1..23: mol_type = other DNA
gccttccygcccccccatcaggg

SEQ ID NO: 1530 - DNA, 23 bp, synthetic construct
  misc_feature 1..23: note = Synthetic Polynucleotide
  source 1..23: mol_type = other DNA
acactacyacattgccgctgagg

SEQ ID NO: 1531 - DNA, 23 bp, synthetic construct
  misc_feature 1..23: note = Synthetic Polynucleotide
  source 1..23: mol_type = other DNA
gtgcagayacttggaggcaatgg

SEQ ID NO: 1532 - DNA, 23 bp, synthetic construct
  misc_feature 1..23: note = Synthetic Polynucleotide
  source 1..23: mol_type = other DNA
cagcgaygttcagatactagagg

SEQ ID NO: 1533 - DNA, 23 bp, synthetic construct
  misc_feature 1..23: note = Synthetic Polynucleotide
  source 1..23: mol_type = other DNA
atgggcyaagcgaggagcagagg

SEQ ID NO: 1534 - DNA, 23 bp, synthetic construct
  misc_feature 1..23: note = Synthetic Polynucleotide
  source 1..23: mol_type = other DNA
attacgyccagtcctacaaatgg

SEQ ID NO: 1535 - DNA, 23 bp, synthetic construct
  misc_feature 1..23: note = Synthetic Polynucleotide
  source 1..23: mol_type = other DNA
ttacgyccagtcctacaaatggg

SEQ ID NO: 1536 - DNA, 23 bp, synthetic construct
  misc_feature 1..23: note = Synthetic Polynucleotide
  source 1..23: mol_type = other DNA
tacgyccagtcctacaaatgggg

SEQ ID NO: 1537 - DNA, 23 bp, synthetic construct
  misc_feature 1..23: note = Synthetic Polynucleotide
  source 1..23: mol_type = other DNA
cgcccggyacggcatcgcgtggg

SEQ ID NO: 1538 - DNA, 23 bp, synthetic construct
  misc_feature 1..23: note = Synthetic Polynucleotide
  source 1..23: mol_type = other DNA
gcccggyacggcatcgcgtgggg

SEQ ID NO: 1539 - DNA, 23 bp, synthetic construct
  misc_feature 1..23: note = Synthetic Polynucleotide
  source 1..23: mol_type = other DNA
gtttgccyccttcatcgacaagg

SEQ ID NO: 1540 - DNA, 23 bp, synthetic construct
  misc_feature 1..23: note = Synthetic Polynucleotide
  source 1..23: mol_type = other DNA
aaggacaytcctgtccccaaggg

SEQ ID NO: 1541 - DNA, 23 bp, synthetic construct
  misc_feature 1..23: note = Synthetic Polynucleotide
  source 1..23: mol_type = other DNA
gggccygcggcacctggtggtgg

SEQ ID NO: 1542 - DNA, 23 bp, synthetic construct
  misc_feature 1..23: note = Synthetic Polynucleotide
  source 1..23: mol_type = other DNA
gatgaccytgacctcattgctgg

SEQ ID NO: 1543 - DNA, 23 bp, synthetic construct
  misc_feature 1..23: note = Synthetic Polynucleotide
  source 1..23: mol_type = other DNA
ctgyttccctttaggaatctcgg

SEQ ID NO: 1544 - DNA, 23 bp, synthetic construct
  misc_feature 1..23: note = Synthetic Polynucleotide
  source 1..23: mol_type = other DNA
ctcttctygcacagtggaccggg

SEQ ID NO: 1545 - DNA, 23 bp, synthetic construct
  misc_feature 1..23: note = Synthetic Polynucleotide
  source 1..23: mol_type = other DNA
gggacaygttacaacaccgttgg

SEQ ID NO: 1546 - DNA, 23 bp, synthetic construct
  misc_feature 1..23: note = Synthetic Polynucleotide
  source 1..23: mol_type = other DNA
cagctgycctgccagggccgcgg

SEQ ID NO: 1547 - DNA, 23 bp, synthetic construct
  misc_feature 1..23: note = Synthetic Polynucleotide
  source 1..23: mol_type = other DNA
agctgycctgccagggccgcggg

SEQ ID NO: 1548 - DNA, 23 bp, synthetic construct
  misc_feature 1..23: note = Synthetic Polynucleotide
  source 1..23: mol_type = other DNA
gctgycctgccagggccgcgggg

SEQ ID NO: 1549 - DNA, 23 bp, synthetic construct
  misc_feature 1..23: note = Synthetic Polynucleotide
  source 1..23: mol_type = other DNA
ctgycctgccagggccgcggggg

SEQ ID NO: 1550 - DNA, 23 bp, synthetic construct
  misc_feature 1..23: note = Synthetic Polynucleotide
  source 1..23: mol_type = other DNA
tgcygtccaaaggcacctactgg

SEQ ID NO: 1551 - DNA, 23 bp, synthetic construct
  misc_feature 1..23: note = Synthetic Polynucleotide
  source 1..23: mol_type = other DNA
gaaygtccccccaacttcaccgg

SEQ ID NO: 1552 - DNA, 23 bp, synthetic construct
  misc_feature 1..23: note = Synthetic Polynucleotide
  source 1..23: mol_type = other DNA
agggyacctggacgaccccacgg

SEQ ID NO: 1553 - DNA, 23 bp, synthetic construct
  misc_feature 1..23: note = Synthetic Polynucleotide
  source 1..23: mol_type = other DNA
ggaccycgccttccattcggcgg

SEQ ID NO: 1554 - DNA, 23 bp, synthetic construct
  misc_feature 1..23: note = Synthetic Polynucleotide
  source 1..23: mol_type = other DNA
gtccyggaagccattgagccagg

SEQ ID NO: 1555 - DNA, 23 bp, synthetic construct
  misc_feature 1..23: note = Synthetic Polynucleotide
  source 1..23: mol_type = other DNA
ccctcytcaatgctgccaactgg

SEQ ID NO: 1556 - DNA, 23 bp, synthetic construct
  misc_feature 1..23: note = Synthetic Polynucleotide
  source 1..23: mol_type = other DNA
ttccctgytccgggctggccggg

SEQ ID NO: 1557 - DNA, 23 bp, synthetic construct
  misc_feature 1..23: note = Synthetic Polynucleotide
  source 1..23: mol_type = other DNA
agcccaygccaacaatccactgg

SEQ ID NO: 1558 - DNA, 23 bp, synthetic construct
  misc_feature 1..23: note = Synthetic Polynucleotide
  source 1..23: mol_type = other DNA
tgtgytccttctggtcatcgtgg

SEQ ID NO: 1559 - DNA, 23 bp, synthetic construct
  misc_feature 1..23: note = Synthetic Polynucleotide
  source 1..23: mol_type = other DNA
ggcgacycctttgtctttgaagg

SEQ ID NO: 1560 - DNA, 23 bp, synthetic construct
  misc_feature 1..23: note = Synthetic Polynucleotide
  source 1..23: mol_type = other DNA
aatgtacyaccaagaatcaaagg

SEQ ID NO: 1561 - DNA, 23 bp, synthetic construct
  misc_feature 1..23: note = Synthetic Polynucleotide
  source 1..23: mol_type = other DNA
ctggtgcytggggctcctggcgg

SEQ ID NO: 1562 - DNA, 23 bp, synthetic construct
  misc_feature 1..23: note = Synthetic Polynucleotide
  source 1..23: mol_type = other DNA
gagcccaytgaaatacgctcagg

SEQ ID NO: 1563 - DNA, 23 bp, synthetic construct
  misc_feature 1..23: note = Synthetic Polynucleotide
  source 1..23: mol_type = other DNA
attgacycagtcggattcaatgg

SEQ ID NO: 1564 - DNA, 23 bp, synthetic construct
  misc_feature 1..23: note = Synthetic Polynucleotide
  source 1..23: mol_type = other DNA
tgcggcygaggtaggtggtctgg

SEQ ID NO: 1565 - DNA, 23 bp, synthetic construct
  misc_feature 1..23: note = Synthetic Polynucleotide
  source 1..23: mol_type = other DNA
gcggcygaggtaggtggtctggg

SEQ ID NO: 1566 - DNA, 23 bp, synthetic construct
  misc_feature 1..23: note = Synthetic Polynucleotide
  source 1..23: mol_type = other DNA
gacttctyggccctggatcttgg

SEQ ID NO: 1567 - DNA, 23 bp, synthetic construct
  misc_feature 1..23: note = Synthetic Polynucleotide
  source 1..23: mol_type = other DNA
ttctyggccctggatcttggagg

SEQ ID NO: 1568 - DNA, 23 bp, synthetic construct
  misc_feature 1..23: note = Synthetic Polynucleotide
  source 1..23: mol_type = other DNA
agcyccagaagcctttcttttgg

SEQ ID NO: 1569 - DNA, 23 bp, synthetic construct
  misc_feature 1..23: note = Synthetic Polynucleotide
  source 1..23: mol_type = other DNA
tggagygcattgagtagggccgg

SEQ ID NO: 1570 - DNA, 23 bp, synthetic construct
  misc_feature 1..23: note = Synthetic Polynucleotide
  source 1..23: mol_type = other DNA
ggaccygctcaatgtcaagctgg

SEQ ID NO: 1571 - DNA, 23 bp, synthetic construct
  misc_feature 1..23: note = Synthetic Polynucleotide
  source 1..23: mol_type = other DNA
taccaggygtccctgaattctgg

SEQ ID NO: 1572 - DNA, 23 bp, synthetic construct
  misc_feature 1..23: note = Synthetic Polynucleotide
  source 1..23: mol_type = other DNA
aaagaayctgtagatcaaagagg

SEQ ID NO: 1573 - DNA, 23 bp, synthetic construct
  misc_feature 1..23: note = Synthetic Polynucleotide
  source 1..23: mol_type = other DNA
acgaacaycttcctcaaatttgg

SEQ ID NO: 1574 - DNA, 23 bp, synthetic construct
  misc_feature 1..23: note = Synthetic Polynucleotide
  source 1..23: mol_type = other DNA
gacgtyctctgagaggacgctgg

SEQ ID NO: 1575 - DNA, 23 bp, synthetic construct
  misc_feature 1..23: note = Synthetic Polynucleotide
  source 1..23: mol_type = other DNA
gaagcyggaggcgcaggtgcagg

SEQ ID NO: 1576 - DNA, 23 bp, synthetic construct
  misc_feature 1..23: note = Synthetic Polynucleotide
  source 1..23: mol_type = other DNA
caaaccyatatccgcagagttgg

SEQ ID NO: 1577 - DNA, 23 bp, synthetic construct
  misc_feature 1..23: note = Synthetic Polynucleotide
  source 1..23: mol_type = other DNA
tggccttycctggccccaggtgg

SEQ ID NO: 1578 - DNA, 23 bp, synthetic construct
  misc_feature 1..23: note = Synthetic Polynucleotide
  source 1..23: mol_type = other DNA
ggccttycctggccccaggtggg

SEQ ID NO: 1579 - DNA, 23 bp, synthetic construct
  misc_feature 1..23: note = Synthetic Polynucleotide
  source 1..23: mol_type = other DNA
gacttcaytgaggaccagggtgg

SEQ ID NO: 1580 - DNA, 23 bp, synthetic construct
  misc_feature 1..23: note = Synthetic Polynucleotide
  source 1..23: mol_type = other DNA
acttcaytgaggaccagggtggg

SEQ ID NO: 1581 - DNA, 23 bp, synthetic construct
  misc_feature 1..23: note = Synthetic Polynucleotide
  source 1..23: mol_type = other DNA
cttcygggccgggaccgtgatgg

SEQ ID NO: 1582 - DNA, 23 bp, synthetic construct
  misc_feature 1..23: note = Synthetic Polynucleotide
  source 1..23: mol_type = other DNA
ttcygggccgggaccgtgatggg

SEQ ID NO: 1583 - DNA, 23 bp, synthetic construct
  misc_feature 1..23: note = Synthetic Polynucleotide
  source 1..23: mol_type = other DNA
cagccygatccccatcactgtgg

SEQ ID NO: 1584 - DNA, 23 bp, synthetic construct
  misc_feature 1..23: note = Synthetic Polynucleotide
  source 1..23: mol_type = other DNA
gccyctaccctgggctcatctgg

SEQ ID NO: 1585 - DNA, 23 bp, synthetic construct
  misc_feature 1..23: note = Synthetic Polynucleotide
  source 1..23: mol_type = other DNA
tctcacygctagaaaagacttgg

SEQ ID NO: 1586 - DNA, 23 bp, synthetic construct
  misc_feature 1..23: note = Synthetic Polynucleotide
  source 1..23: mol_type = other DNA
gggcagygtacttgccgcactgg

SEQ ID NO: 1587 - DNA, 23 bp, synthetic construct
  misc_feature 1..23: note = Synthetic Polynucleotide
  source 1..23: mol_type = other DNA
gagtyctttgcccttttgagagg

SEQ ID NO: 1588 - DNA, 23 bp, synthetic construct
  misc_feature 1..23: note = Synthetic Polynucleotide
  source 1..23: mol_type = other DNA
ccgccgcyattaccccggccagg

SEQ ID NO: 1589 - DNA, 23 bp, synthetic construct
  misc_feature 1..23: note = Synthetic Polynucleotide
  source 1..23: mol_type = other DNA
cgccgcyattaccccggccaggg

SEQ ID NO: 1590 - DNA, 23 bp, synthetic construct
  misc_feature 1..23: note = Synthetic Polynucleotide
  source 1..23: mol_type = other DNA
ccaaaacycacctttcctggtgg

SEQ ID NO: 1591 - DNA, 23 bp, synthetic construct
  misc_feature 1..23: note = Synthetic Polynucleotide
  source 1..23: mol_type = other DNA
ggaccagyacatgaggactgggg

SEQ ID NO: 1592 - DNA, 23 bp, synthetic construct
  misc_feature 1..23: note = Synthetic Polynucleotide
  source 1..23: mol_type = other DNA
ccagyacatgaggactggggagg

SEQ ID NO: 1593 - DNA, 23 bp, synthetic construct
  misc_feature 1..23: note = Synthetic Polynucleotide
  source 1..23: mol_type = other DNA
cagyacatgaggactggggaggg

SEQ ID NO: 1594 - DNA, 23 bp, synthetic construct
  misc_feature 1..23: note = Synthetic Polynucleotide
  source 1..23: mol_type = other DNA
cagcagcygcaggagcacctggg

SEQ ID NO: 1595 - DNA, 23 bp, synthetic construct
  misc_feature 1..23: note = Synthetic Polynucleotide
  source 1..23: mol_type = other DNA
tgccatcycactggcgtacgagg

SEQ ID NO: 1596 - DNA, 23 bp, synthetic construct
  misc_feature 1..23: note = Synthetic Polynucleotide
  source 1..23: mol_type = other DNA
aggacyctgagccaggggcccgg

SEQ ID NO: 1597 - DNA, 23 bp, synthetic construct
  misc_feature 1..23: note = Synthetic Polynucleotide
  source 1..23: mol_type = other DNA
ggccgcygcccaacgccatccgg

SEQ ID NO: 1598 - DNA, 23 bp, synthetic construct
  misc_feature 1..23: note = Synthetic Polynucleotide
  source 1..23: mol_type = other DNA
tgcacytgccgtgggtgcagagg

SEQ ID NO: 1599 - DNA, 23 bp, synthetic construct
  misc_feature 1..23: note = Synthetic Polynucleotide
  source 1..23: mol_type = other DNA
agcgcycctcagcatctgccagg

SEQ ID NO: 1600 - DNA, 23 bp, synthetic construct
  misc_feature 1..23: note = Synthetic Polynucleotide
  source 1..23: mol_type = other DNA
accacygggggtaaaaaaagggg

SEQ ID NO: 1601 - DNA, 23 bp, synthetic construct
  misc_feature 1..23: note = Synthetic Polynucleotide
  source 1..23: mol_type = other DNA
taccacygggggtaaaaaaaggg

SEQ ID NO: 1602 - DNA, 23 bp, synthetic construct
  misc_feature 1..23: note = Synthetic Polynucleotide
  source 1..23: mol_type = other DNA
ataccacygggggtaaaaaaagg

SEQ ID NO: 1603 - DNA, 23 bp, synthetic construct
  misc_feature 1..23: note = Synthetic Polynucleotide
  source 1..23: mol_type = other DNA
ccctyctcggagccctgtagagg

SEQ ID NO: 1604 - DNA, 23 bp, synthetic construct
  misc_feature 1..23: note = Synthetic Polynucleotide
  source 1..23: mol_type = other DNA
ttcycctccacgctctcgcctgg

SEQ ID NO: 1605 - DNA, 23 bp, synthetic construct
  misc_feature 1..23: note = Synthetic Polynucleotide
  source 1..23: mol_type = other DNA
gcccctyggagcccacgcagagg

SEQ ID NO: 1606 - DNA, 23 bp, synthetic construct
  misc_feature 1..23: note = Synthetic Polynucleotide
  source 1..23: mol_type = other DNA
ttctcyaaaagcttctgataagg

SEQ ID NO: 1607 - DNA, 23 bp, synthetic construct
  misc_feature 1..23: note = Synthetic Polynucleotide
  source 1..23: mol_type = other DNA
attgycgtcgtcgtcgtcgcagg

SEQ ID NO: 1608 - DNA, 23 bp, synthetic construct
  misc_feature 1..23: note = Synthetic Polynucleotide
  source 1..23: mol_type = other DNA
gtacygtaaggaagattctcggg

SEQ ID NO: 1609 - DNA, 23 bp, synthetic construct
  misc_feature 1..23: note = Synthetic Polynucleotide
  source 1..23: mol_type = other DNA
ggtacygtaaggaagattctcgg

SEQ ID NO: 1610 - DNA, 23 bp, synthetic construct
  misc_feature 1..23: note = Synthetic Polynucleotide
  source 1..23: mol_type = other DNA
tccyggtctgaccattccccagg

SEQ ID NO: 1611 - DNA, 23 bp, synthetic construct
  misc_feature 1..23: note = Synthetic Polynucleotide
  source 1..23: mol_type = other DNA
actcaycaatatctgcaaaatgg

SEQ ID NO: 1612 - DNA, 23 bp, synthetic construct
  misc_feature 1..23: note = Synthetic Polynucleotide
  source 1..23: mol_type = other DNA
gaatagyccatcgcagagcaagg

SEQ ID NO: 1613 - DNA, 23 bp, synthetic construct
  misc_feature 1..23: note = Synthetic Polynucleotide
  source 1..23: mol_type = other DNA
agtccacytggggaggaaggtgg

SEQ ID NO: 1614 - DNA, 23 bp, synthetic construct
  misc_feature 1..23: note = Synthetic Polynucleotide
  source 1..23: mol_type = other DNA
attcacaytcttcaacttaatgg

SEQ ID NO: 1615 - DNA, 23 bp, synthetic construct
  misc_feature 1..23: note = Synthetic Polynucleotide
  source 1..23: mol_type = other DNA
tgttcayactggaagccggcggg

SEQ ID NO: 1616 - DNA, 23 bp, synthetic construct
  misc_feature 1..23: note = Synthetic Polynucleotide
  source 1..23: mol_type = other DNA
ctgttcayactggaagccggcgg

SEQ ID NO: 1617 - DNA, 23 bp, synthetic construct
  misc_feature 1..23: note = Synthetic Polynucleotide
  source 1..23: mol_type = other DNA
gcaytgaccaccacctcaagtgg

SEQ ID NO: 1618 - DNA, 23 bp, synthetic construct
  misc_feature 1..23: note = Synthetic Polynucleotide
  source 1..23: mol_type = other DNA
cggagyccttccacagccgctgg

SEQ ID NO: 1619 - DNA, 23 bp, synthetic construct
  misc_feature 1..23: note = Synthetic Polynucleotide
  source 1..23: mol_type = other DNA
ggatgyacctgaggacaggcagg

SEQ ID NO: 1620 - DNA, 23 bp, synthetic construct
  misc_feature 1..23: note = Synthetic Polynucleotide
  source 1..23: mol_type = other DNA
gacacygaggtgctgagtacggg

SEQ ID NO: 1621 - DNA, 23 bp, synthetic construct
  misc_feature 1..23: note = Synthetic Polynucleotide
  source 1..23: mol_type = other DNA
cgacacygaggtgctgagtacgg

SEQ ID NO: 1622 - DNA, 23 bp, synthetic construct
  misc_feature 1..23: note = Synthetic Polynucleotide
  source 1..23: mol_type = other DNA
tgccgyacccgatcatacctggg

SEQ ID NO: 1623 - DNA, 23 bp, synthetic construct
  misc_feature 1..23: note = Synthetic Polynucleotide
  source 1..23: mol_type = other DNA
atgccgyacccgatcatacctgg

SEQ ID NO: 1624 - DNA, 23 bp, synthetic construct
  misc_feature 1..23: note = Synthetic Polynucleotide
  source 1..23: mol_type = other DNA
gacayacccctgggtggtggagg

SEQ ID NO: 1625 - DNA, 23 bp, synthetic construct
  misc_feature 1..23: note = Synthetic Polynucleotide
  source 1..23: mol_type = other DNA
gcggacayacccctgggtggtgg

SEQ ID NO: 1626 - DNA, 23 bp, synthetic construct
  misc_feature 1..23: note = Synthetic Polynucleotide
  source 1..23: mol_type = other DNA
gtagyagcaggagatcatcgtgg

SEQ ID NO: 1627 - DNA, 23 bp, synthetic construct
  misc_feature 1..23: note = Synthetic Polynucleotide
  source 1..23: mol_type = other DNA
atatytgcatgttttctccaagg

SEQ ID NO: 1628 - DNA, 23 bp, synthetic construct
  misc_feature 1..23: note = Synthetic Polynucleotide
  source 1..23: mol_type = other DNA
ccaygtcagtctctgtcctccgg

SEQ ID NO: 1629 - DNA, 23 bp, synthetic construct
  misc_feature 1..23: note = Synthetic Polynucleotide
  source 1..23: mol_type = other DNA
ctccygagggcttaggattgggg

SEQ ID NO: 1630 - DNA, 23 bp, synthetic construct
  misc_feature 1..23: note = Synthetic Polynucleotide
  source 1..23: mol_type = other DNA
cctccygagggcttaggattggg

SEQ ID NO: 1631 - DNA, 23 bp, synthetic construct
  misc_feature 1..23: note = Synthetic Polynucleotide
  source 1..23: mol_type = other DNA
acctccygagggcttaggattgg

SEQ ID NO: 1632 - DNA, 23 bp, synthetic construct
  misc_feature 1..23: note = Synthetic Polynucleotide
  source 1..23: mol_type = other DNA
tcctacayagtggtactcagagg

SEQ ID NO: 1633 - DNA, 23 bp, synthetic construct
  misc_feature 1..23: note = Synthetic Polynucleotide
  source 1..23: mol_type = other DNA
ctgyactggcagagggattctgg

SEQ ID NO: 1634 - DNA, 23 bp, synthetic construct
  misc_feature 1..23: note = Synthetic Polynucleotide
  source 1..23: mol_type = other DNA
gcgyttccacgatgaagaagggg

SEQ ID NO: 1635 - DNA, 23 bp, synthetic construct
  misc_feature 1..23: note = Synthetic Polynucleotide
  source 1..23: mol_type = other DNA
agcgyttccacgatgaagaaggg

SEQ ID NO: 1636 - DNA, 23 bp, synthetic construct
  misc_feature 1..23: note = Synthetic Polynucleotide
  source 1..23: mol_type = other DNA
cagcgyttccacgatgaagaagg

SEQ ID NO: 1637 - DNA, 23 bp, synthetic construct
  misc_feature 1..23: note = Synthetic Polynucleotide
  source 1..23: mol_type = other DNA
agttgtcycaatacctgctttgg

SEQ ID NO: 1638 - DNA, 23 bp, synthetic construct
  misc_feature 1..23: note = Synthetic Polynucleotide
  source 1..23: mol_type = other DNA
atayctccaacctcaaacttggg

SEQ ID NO: 1639 - DNA, 23 bp, synthetic construct
  misc_feature 1..23: note = Synthetic Polynucleotide
  source 1..23: mol_type = other DNA
gatayctccaacctcaaacttgg

SEQ ID NO: 1640 - DNA, 23 bp, synthetic construct
  misc_feature 1..23: note = Synthetic Polynucleotide
  source 1..23: mol_type = other DNA
ggcactycttggcatagcgacgg

SEQ ID NO: 1641 - DNA, 23 bp, synthetic construct
  misc_feature 1..23: note = Synthetic Polynucleotide
  source 1..23: mol_type = other DNA
gcggtcaytgaggttctgcatgg

SEQ ID NO: 1642 - DNA, 23 bp, synthetic construct
  misc_feature 1..23: note = Synthetic Polynucleotide
  source 1..23: mol_type = other DNA
ctgctgcygtcgtcgtcgcttgg

SEQ ID NO: 1643 - DNA, 23 bp, synthetic construct
  misc_feature 1..23: note = Synthetic Polynucleotide
  source 1..23: mol_type = other DNA
cctycttcacctgcttgaggtgg

SEQ ID NO: 1644 - DNA, 23 bp, synthetic construct
  misc_feature 1..23: note = Synthetic Polynucleotide
  source 1..23: mol_type = other DNA
cctcctycttcacctgcttgagg

SEQ ID NO: 1645 - DNA, 23 bp, synthetic construct
  misc_feature 1..23: note = Synthetic Polynucleotide
  source 1..23: mol_type = other DNA
gtcctgyccctccgccacagtgg

SEQ ID NO: 1646 - DNA, 23 bp, synthetic construct
  misc_feature 1..23: note = Synthetic Polynucleotide
  source 1..23: mol_type = other DNA
gtgccayacctggtgtggggagg

SEQ ID NO: 1647 - DNA, 23 bp, synthetic construct
  misc_feature 1..23: note = Synthetic Polynucleotide
  source 1..23: mol_type = other DNA
aaagactyttcccaccgacatgg

SEQ ID NO: 1648 - DNA, 23 bp, synthetic construct
  misc_feature 1..23: note = Synthetic Polynucleotide
  source 1..23: mol_type = other DNA
tggygcctcatgcagcgtcgagg

SEQ ID NO: 1649 - DNA, 23 bp, synthetic construct
  misc_feature 1..23: note = Synthetic Polynucleotide
  source 1..23: mol_type = other DNA
aagcycttaatatctgtgcatgg

SEQ ID NO: 1650 - DNA, 23 bp, synthetic construct
  misc_feature 1..23: note = Synthetic Polynucleotide
  source 1..23: mol_type = other DNA
taaacygcagagagaaccaaggg

SEQ ID NO: 1651 - DNA, 23 bp, synthetic construct
  misc_feature 1..23: note = Synthetic Polynucleotide
  source 1..23: mol_type = other DNA
gtaaacygcagagagaaccaagg

SEQ ID NO: 1652 - DNA, 23 bp, synthetic construct
  misc_feature 1..23: note = Synthetic Polynucleotide
  source 1..23: mol_type = other DNA
cccacayatccatctgcctgcgg

SEQ ID NO: 1653 - DNA, 23 bp, synthetic construct
  misc_feature 1..23: note = Synthetic Polynucleotide
  source 1..23: mol_type = other DNA
cacccaycttcttcacccctcgg

SEQ ID NO: 1654 - DNA, 23 bp, synthetic construct
  misc_feature 1..23: note = Synthetic Polynucleotide
  source 1..23: mol_type = other DNA
atccattycaaagtaagcaatgg

SEQ ID NO: 1655 - DNA, 23 bp, synthetic construct
  misc_feature 1..23: note = Synthetic Polynucleotide
  source 1..23: mol_type = other DNA
gggccyggcccgcacgtcacagg

SEQ ID NO: 1656 - DNA, 23 bp, synthetic construct
  misc_feature 1..23: note = Synthetic Polynucleotide
  source 1..23: mol_type = other DNA
cgtcygtacgtgggcggcctggg

SEQ ID NO: 1657 - DNA, 23 bp, synthetic construct
  misc_feature 1..23: note = Synthetic Polynucleotide
  source 1..23: mol_type = other DNA
gcgtcygtacgtgggcggcctgg

SEQ ID NO: 1658 - DNA, 23 bp, synthetic construct
  misc_feature 1..23: note = Synthetic Polynucleotide
  source 1..23: mol_type = other DNA
cgcccygcggccgagagggcggg

SEQ ID NO: 1659 - DNA, 23 bp, synthetic construct
  misc_feature 1..23: note = Synthetic Polynucleotide
  source 1..23: mol_type = other DNA
gcgcccygcggccgagagggcgg

SEQ ID NO: 1660 - DNA, 23 bp, synthetic construct
  misc_feature 1..23: note = Synthetic Polynucleotide
  source 1..23: mol_type = other DNA
gttcayagatgtcaaggttctgg

SEQ ID NO: 1661 - DNA, 23 bp, synthetic construct
  misc_feature 1..23: note = Synthetic Polynucleotide
  source 1..23: mol_type = other DNA
ggcayacagctctttggataagg

SEQ ID NO: 1662 - DNA, 23 bp, synthetic construct
  misc_feature 1..23: note = Synthetic Polynucleotide
  source 1..23: mol_type = other DNA
gagcatyctctgtttcaaagagg

SEQ ID NO: 1663 - DNA, 23 bp, synthetic construct
  misc_feature 1..23: note = Synthetic Polynucleotide
  source 1..23: mol_type = other DNA
ggcagcaytgcactgacaggcgg

SEQ ID NO: 1664 - DNA, 23 bp, synthetic construct
  misc_feature 1..23: note = Synthetic Polynucleotide
  source 1..23: mol_type = other DNA
aaggactycccttgcaataaagg

SEQ ID NO: 1665 - DNA, 23 bp, synthetic construct
  misc_feature 1..23: note = Synthetic Polynucleotide
  source 1..23: mol_type = other DNA
gactycagatgtaactcttatgg

SEQ ID NO: 1666 - DNA, 23 bp, synthetic construct
  misc_feature 1..23: note = Synthetic Polynucleotide
  source 1..23: mol_type = other DNA
gactcyagctatatcttcacagg

SEQ ID NO: 1667 - DNA, 23 bp, synthetic construct
  misc_feature 1..23: note = Synthetic Polynucleotide
  source 1..23: mol_type = other DNA
ttccacayccacatcaccattgg

SEQ ID NO: 1668 - DNA, 23 bp, synthetic construct
  misc_feature 1..23: note = Synthetic Polynucleotide
  source 1..23: mol_type = other DNA
atcytctctgagttggtgttggg

SEQ ID NO: 1669 - DNA, 23 bp, synthetic construct
  misc_feature 1..23: note = Synthetic Polynucleotide
  source 1..23: mol_type = other DNA
gatcytctctgagttggtgttgg

SEQ ID NO: 1670 - DNA, 23 bp, synthetic construct
  misc_feature 1..23: note = Synthetic Polynucleotide
  source 1..23: mol_type = other DNA
aacctcgycttccaagtggctgg

SEQ ID NO: 1671 - DNA, 23 bp, synthetic construct
  misc_feature 1..23: note = Synthetic Polynucleotide
  source 1..23: mol_type = other DNA
ccccctycttttgggctcgctgg

SEQ ID NO: 1672 - DNA, 23 bp, synthetic construct
  misc_feature 1..23: note = Synthetic Polynucleotide
  source 1..23: mol_type = other DNA
gccgccgytttggctggcacggg

SEQ ID NO: 1673 - DNA, 23 bp, synthetic construct
  misc_feature 1..23: note = Synthetic Polynucleotide
  source 1..23: mol_type = other DNA
tgggcygttccaagacaccaggg

SEQ ID NO: 1674 - DNA, 23 bp, synthetic construct
  misc_feature 1..23: note = Synthetic Polynucleotide
  source 1..23: mol_type = other DNA
gtgggcygttccaagacaccagg

SEQ ID NO: 1675 - DNA, 23 bp, synthetic construct
  misc_feature 1..23: note = Synthetic Polynucleotide
  source 1..23: mol_type = other DNA
cactgcgyaggtggtgaccccgg

SEQ ID NO: 1676 - DNA, 23 bp, synthetic construct
  misc_feature 1..23: note = Synthetic Polynucleotide
  source 1..23: mol_type = other DNA
gtctyctactcggttcaggcggg

SEQ ID NO: 1677 - DNA, 23 bp, synthetic construct
  misc_feature 1..23: note = Synthetic Polynucleotide
  source 1..23: mol_type = other DNA
tgtctyctactcggttcaggcgg

SEQ ID NO: 1678 - DNA, 23 bp, synthetic construct
  misc_feature 1..23: note = Synthetic Polynucleotide
  source 1..23: mol_type = other DNA
aggyctgtggagtgcaggagagg

SEQ ID NO: 1679 - DNA, 23 bp, synthetic construct
  misc_feature 1..23: note = Synthetic Polynucleotide
  source 1..23: mol_type = other DNA
gccygcagtggagagaggagagg

SEQ ID NO: 1680 - DNA, 23 bp, synthetic construct
  misc_feature 1..23: note = Synthetic Polynucleotide
  source 1..23: mol_type = other DNA
ccgcccyggagacacgaagctgg

SEQ ID NO: 1681 - DNA, 23 bp, synthetic construct
  misc_feature 1..23: note = Synthetic Polynucleotide
  source 1..23: mol_type = other DNA
accygtcgagataatgggtcagg

SEQ ID NO: 1682 - DNA, 23 bp, synthetic construct
  misc_feature 1..23: note = Synthetic Polynucleotide
  source 1..23: mol_type = other DNA
cctctgycatgaagatgtcctgg

SEQ ID NO: 1683 - DNA, 23 bp, synthetic construct
  misc_feature 1..23: note = Synthetic Polynucleotide
  source 1..23: mol_type = other DNA
ctcctgyccccgctccacggtgg

SEQ ID NO: 1684 - DNA, 23 bp, synthetic construct
  misc_feature 1..23: note = Synthetic Polynucleotide
  source 1..23: mol_type = other DNA
gcaygacactgcaggggggtggg

SEQ ID NO: 1685 - DNA, 23 bp, synthetic construct
  misc_feature 1..23: note = Synthetic Polynucleotide
  source 1..23: mol_type = other DNA
cgcaygacactgcaggggggtgg

SEQ ID NO: 1686 - DNA, 23 bp, synthetic construct
  misc_feature 1..23: note = Synthetic Polynucleotide
  source 1..23: mol_type = other DNA
aaccgcaygacactgcagggggg

SEQ ID NO: 1687 - DNA, 23 bp, synthetic construct
  misc_feature 1..23: note = Synthetic Polynucleotide
  source 1..23: mol_type = other DNA
gacycccgtgaaatgattcccgg

SEQ ID NO: 1688 - DNA, 23 bp, synthetic construct
  misc_feature 1..23: note = Synthetic Polynucleotide
  source 1..23: mol_type = other DNA
tcaaccycaccctgtacttcagg

SEQ ID NO: 1689 - DNA, 23 bp, synthetic construct
  misc_feature 1..23: note = Synthetic Polynucleotide
  source 1..23: mol_type = other DNA
gggcyttattccatctctctcgg

SEQ ID NO: 1690 - DNA, 23 bp, synthetic construct
  misc_feature 1..23: note = Synthetic Polynucleotide
  source 1..23: mol_type = other DNA
caggyccagatcgaaatcccggg

SEQ ID NO: 1691 - DNA, 23 bp, synthetic construct
  misc_feature 1..23: note = Synthetic Polynucleotide
  source 1..23: mol_type = other DNA
ccaggyccagatcgaaatcccgg

SEQ ID NO: 1692 - DNA, 23 bp, synthetic construct
  misc_feature 1..23: note = Synthetic Polynucleotide
  source 1..23: mol_type = other DNA
tacttgcygtagaacagaagggg

SEQ ID NO: 1693 - DNA, 23 bp, synthetic construct
  misc_feature 1..23: note = Synthetic Polynucleotide
  source 1..23: mol_type = other DNA
gtcccygtgtcccgcagtctagg

SEQ ID NO: 1694 - DNA, 23 bp, synthetic construct
  misc_feature 1..23: note = Synthetic Polynucleotide
  source 1..23: mol_type = other DNA
tatcaaygaactgtccctcaggg

SEQ ID NO: 1695 - DNA, 23 bp, synthetic construct
  misc_feature 1..23: note = Synthetic Polynucleotide
  source 1..23: mol_type = other DNA
ctatcaaygaactgtccctcagg

SEQ ID NO: 1696 - DNA, 23 bp, synthetic construct
  misc_feature 1..23: note = Synthetic Polynucleotide
  source 1..23: mol_type = other DNA
atgacgyggcctgaatcacaggg

SEQ ID NO: 1697 - DNA, 23 bp, synthetic construct
  misc_feature 1..23: note = Synthetic Polynucleotide
  source 1..23: mol_type = other DNA
aatgacgyggcctgaatcacagg

SEQ ID NO: 1698 - DNA, 23 bp, synthetic construct
  misc_feature 1..23: note = Synthetic Polynucleotide
  source 1..23: mol_type = other DNA
atatccygggggagcagaaaggg

SEQ ID NO: 1699 - DNA, 23 bp, synthetic construct
  misc_feature 1..23: note = Synthetic Polynucleotide
  source 1..23: mol_type = other DNA
gatatccygggggagcagaaagg

SEQ ID NO: 1700 - DNA, 23 bp, synthetic construct
  misc_feature 1..23: note = Synthetic Polynucleotide
  source 1..23: mol_type = other DNA
cagcccaytgataattgggatgg

SEQ ID NO: 1701 - DNA, 23 bp, synthetic construct
  misc_feature 1..23: note = Synthetic Polynucleotide
  source 1..23: mol_type = other DNA
atcyatcaaatacaaaaatttgg

SEQ ID NO: 1702 - DNA, 23 bp, synthetic construct
  misc_feature 1..23: note = Synthetic Polynucleotide
  source 1..23: mol_type = other DNA
cagctcygagaagaaaccacggg

SEQ ID NO: 1703 - DNA, 23 bp, synthetic construct
  misc_feature 1..23: note = Synthetic Polynucleotide
  source 1..23: mol_type = other DNA
tcagctcygagaagaaaccacgg

SEQ ID NO: 1704 - DNA, 23 bp, synthetic construct
  misc_feature 1..23: note = Synthetic Polynucleotide
  source 1..23: mol_type = other DNA
cttcytgctgcggtccccaatgg

SEQ ID NO: 1705 - DNA, 23 bp, synthetic construct
  misc_feature 1..23: note = Synthetic Polynucleotide
  source 1..23: mol_type = other DNA
ttcccygtaagaaaattaacagg

SEQ ID NO: 1706 - DNA, 23 bp, synthetic construct
  misc_feature 1..23: note = Synthetic Polynucleotide
  source 1..23: mol_type = other DNA
gcaccayggctgcgggtcgaggg

SEQ ID NO: 1707 - DNA, 23 bp, synthetic construct
  misc_feature 1..23: note = Synthetic Polynucleotide
  source 1..23: mol_type = other DNA
ggcaccayggctgcgggtcgagg

SEQ ID NO: 1708 - DNA, 23 bp, synthetic construct
  misc_feature 1..23: note = Synthetic Polynucleotide
  source 1..23: mol_type = other DNA
tggcytgtcacccggatatgtgg

SEQ ID NO: 1709 - DNA, 23 bp, synthetic construct
  misc_feature 1..23: note = Synthetic Polynucleotide
  source 1..23: mol_type = other DNA
gaccygcaggcaggagaaggggg

SEQ ID NO: 1710 - DNA, 23 bp, synthetic construct
  misc_feature 1..23: note = Synthetic Polynucleotide
  source 1..23: mol_type = other DNA
tgaccygcaggcaggagaagggg

SEQ ID NO: 1711 - DNA, 23 bp, synthetic construct
  misc_feature 1..23: note = Synthetic Polynucleotide
  source 1..23: mol_type = other DNA
ctgaccygcaggcaggagaaggg

SEQ ID NO: 1712 - DNA, 23 bp, synthetic construct
  misc_feature 1..23: note = Synthetic Polynucleotide
  source 1..23: mol_type = other DNA
gctgaccygcaggcaggagaagg

SEQ ID NO: 1713 - DNA, 23 bp, synthetic construct
  misc_feature 1..23: note = Synthetic Polynucleotide
  source 1..23: mol_type = other DNA
ggaacaygcactcctcttccagg

SEQ ID NO: 1714 - DNA, 23 bp, synthetic construct
  misc_feature 1..23: note = Synthetic Polynucleotide
  source 1..23: mol_type = other DNA
tccygtcatcactctttttgtgg

SEQ ID NO: 1715 - DNA, 23 bp, synthetic construct
  misc_feature 1..23: note = Synthetic Polynucleotide
  source 1..23: mol_type = other DNA
gcggtcaytgaggttctgcatgg

SEQ ID NO: 1716 - DNA, 23 bp, synthetic construct
  misc_feature 1..23: note = Synthetic Polynucleotide
  source 1..23: mol_type = other DNA
aatcytggccccatagcagatgg

SEQ ID NO: 1717 - DNA, 23 bp, synthetic construct
  misc_feature 1..23: note = Synthetic Polynucleotide
  source 1..23: mol_type = other DNA
tccactycttctggctttctggg

SEQ ID NO: 1718 - DNA, 23 bp, synthetic construct
  misc_feature 1..23: note = Synthetic Polynucleotide
  source 1..23: mol_type = other DNA
atccactycttctggctttctgg

SEQ ID NO: 1719 - DNA, 23 bp, synthetic construct
  misc_feature 1..23: note = Synthetic Polynucleotide
  source 1..23: mol_type = other DNA
actttcygttttctgcctctggg

SEQ ID NO: 1720 - DNA, 23 bp, synthetic construct
  misc_feature 1..23: note = Synthetic Polynucleotide
  source 1..23: mol_type = other DNA
cactttcygttttctgcctctgg

SEQ ID NO: 1721 - DNA, 23 bp, synthetic construct
  misc_feature 1..23: note = Synthetic Polynucleotide
  source 1..23: mol_type = other DNA
ggtggyactggaaggggaagtgg

SEQ ID NO: 1722 - DNA, 23 bp, synthetic construct
  misc_feature 1..23: note = Synthetic Polynucleotide
  source 1..23: mol_type = other DNA
ttgycctctgtccaggcatctgg

SEQ ID NO: 1723 - DNA, 23 bp, synthetic construct
  misc_feature 1..23: note = Synthetic Polynucleotide
  source 1..23: mol_type = other DNA
cgcyctcgtaccctgtgctgtgg

SEQ ID NO: 1724 - DNA, 23 bp, synthetic construct
  misc_feature 1..23: note = Synthetic Polynucleotide
  source 1..23: mol_type = other DNA
gtggygcccgaggtgcccattgg

SEQ ID NO: 1725 - DNA, 23 bp, synthetic construct
  misc_feature 1..23: note = Synthetic Polynucleotide
  source 1..23: mol_type = other DNA
ttayacaaaacaatgttgagtgg

SEQ ID NO: 1726 - DNA, 23 bp, synthetic construct
  misc_feature 1..23: note = Synthetic Polynucleotide
  source 1..23: mol_type = other DNA
acaatyccagctggctgggctgg

SEQ ID NO: 1727 - DNA, 23 bp, synthetic construct
  misc_feature 1..23: note = Synthetic Polynucleotide
  source 1..23: mol_type = other DNA
cggytctggaaccagacctgggg

SEQ ID NO: 1728 - DNA, 23 bp, synthetic construct
  misc_feature 1..23: note = Synthetic Polynucleotide
  source 1..23: mol_type = other DNA
gcggytctggaaccagacctggg

SEQ ID NO: 1729 - DNA, 23 bp, synthetic construct
  misc_feature 1..23: note = Synthetic Polynucleotide
  source 1..23: mol_type = other DNA
tgcggytctggaaccagacctgg

SEQ ID NO: 1730 - DNA, 23 bp, synthetic construct
  misc_feature 1..23: note = Synthetic Polynucleotide
  source 1..23: mol_type = other DNA
cccayggctgcggctggcggcgg

SEQ ID NO: 1731 - DNA, 23 bp, synthetic construct
  misc_feature 1..23: note = Synthetic Polynucleotide
  source 1..23: mol_type = other DNA
cggcccayggctgcggctggcgg

SEQ ID NO: 1732 - DNA, 23 bp, synthetic construct
  misc_feature 1..23: note = Synthetic Polynucleotide
  source 1..23: mol_type = other DNA
aagtcayagtgcacggcacaagg

SEQ ID NO: 1733 - DNA, 23 bp, synthetic construct
  misc_feature 1..23: note = Synthetic Polynucleotide
  source 1..23: mol_type = other DNA
aagcygctctgagggctcccagg

SEQ ID NO: 1734 - DNA, 23 bp, synthetic construct
  misc_feature 1..23: note = Synthetic Polynucleotide
  source 1..23: mol_type = other DNA
gtgygatcatgtaatggcgccgg

SEQ ID NO: 1735 - DNA, 23 bp, synthetic construct
  misc_feature 1..23: note = Synthetic Polynucleotide
  source 1..23: mol_type = other DNA
cctgaccytgtcggagctccggg

SEQ ID NO: 1736 - DNA, 23 bp, synthetic construct
  misc_feature 1..23: note = Synthetic Polynucleotide
  source 1..23: mol_type = other DNA
gccacacyctctgccttgcccgg

SEQ ID NO: 1737 - DNA, 23 bp, synthetic construct
  misc_feature 1..23: note = Synthetic Polynucleotide
  source 1..23: mol_type = other DNA
gggtcygcatttgtccgtggagg

SEQ ID NO: 1738 - DNA, 23 bp, synthetic construct
  misc_feature 1..23: note = Synthetic Polynucleotide
  source 1..23: mol_type = other DNA
cgctctyggcaaagaacgctggg

SEQ ID NO: 1739 - DNA, 23 bp, synthetic construct
  misc_feature 1..23: note = Synthetic Polynucleotide
  source 1..23: mol_type = other DNA
gcgctctyggcaaagaacgctgg

SEQ ID NO: 1740 - DNA, 23 bp, synthetic construct
  misc_feature 1..23: note = Synthetic Polynucleotide
  source 1..23: mol_type = other DNA
agactttyctgcttaaagaaggg

SEQ ID NO: 1741 - DNA, 23 bp, synthetic construct
  misc_feature 1..23: note = Synthetic Polynucleotide
  source 1..23: mol_type = other DNA
ccttttcytgtgtatttgattgg

SEQ ID NO: 1742 - DNA, 23 bp, synthetic construct
  misc_feature 1..23: note = Synthetic Polynucleotide
  source 1..23: mol_type = other DNA
gacacgyctgtgtagtgcacagg

SEQ ID NO: 1743 - DNA, 23 bp, synthetic construct
  misc_feature 1..23: note = Synthetic Polynucleotide
  source 1..23: mol_type = other DNA
actycttctctttctcctgaggg

SEQ ID NO: 1744 - DNA, 23 bp, synthetic construct
  misc_feature 1..23: note = Synthetic Polynucleotide
  source 1..23: mol_type = other DNA
tactycttctctttctcctgagg

SEQ ID NO: 1745 - DNA, 23 bp, synthetic construct
  misc_feature 1..23: note = Synthetic Polynucleotide
  source 1..23: mol_type = other DNA
gcccayagtgtccagagacctgg

SEQ ID NO: 1746 - DNA, 23 bp, synthetic construct
  misc_feature 1..23: note = Synthetic Polynucleotide
  source 1..23: mol_type = other DNA
ataycaccacacacaggtaacgg

SEQ ID NO: 1747 - DNA, 23 bp, synthetic construct
  misc_feature 1..23: note = Synthetic Polynucleotide
  source 1..23: mol_type = other DNA
tggytgcacagacagtacgtggg

SEQ ID NO: 1748 - DNA, 23 bp, synthetic construct
  misc_feature 1..23: note = Synthetic Polynucleotide
  source 1..23: mol_type = other DNA
ctggytgcacagacagtacgtgg

SEQ ID NO: 1749 - DNA, 23 bp, synthetic construct
  misc_feature 1..23: note = Synthetic Polynucleotide
  source 1..23: mol_type = other DNA
gatcaycttcatgtagggcaggg

SEQ ID NO: 1750 - DNA, 23 bp, synthetic construct
  misc_feature 1..23: note = Synthetic Polynucleotide
  source 1..23: mol_type = other DNA
agatcaycttcatgtagggcagg

SEQ ID NO: 1751 - DNA, 23 bp, synthetic construct
  misc_feature 1..23: note = Synthetic Polynucleotide
  source 1..23: mol_type = other DNA
ccayccaaccctaagagaagagg

SEQ ID NO: 1752 - DNA, 23 bp, synthetic construct
  misc_feature 1..23: note = Synthetic Polynucleotide
  source 1..23: mol_type = other DNA
tgaccgygatctgcagagaaggg

SEQ ID NO: 1753 - DNA, 23 bp, synthetic construct
  misc_feature 1..23: note = Synthetic Polynucleotide
  source 1..23: mol_type = other DNA
ctgaccgygatctgcagagaagg

SEQ ID NO: 1754 - DNA, 23 bp, synthetic construct
  misc_feature 1..23: note = Synthetic Polynucleotide
  source 1..23: mol_type = other DNA
gctcaygaagaagatgttctggg

SEQ ID NO: 1755 - DNA, 23 bp, synthetic construct
  misc_feature 1..23: note = Synthetic Polynucleotide
  source 1..23: mol_type = other DNA
tgctcaygaagaagatgttctgg

SEQ ID NO: 1756 - DNA, 23 bp, synthetic construct
  misc_feature 1..23: note = Synthetic Polynucleotide
  source 1..23: mol_type = other DNA
caacyccactttagagcgaaagg

SEQ ID NO: 1757 - DNA, 23 bp, synthetic construct
  misc_feature 1..23: note = Synthetic Polynucleotide
  source 1..23: mol_type = other DNA
cccactyggctcaagaccaatgg

SEQ ID NO: 1758 - DNA, 23 bp, synthetic construct
  misc_feature 1..23: note = Synthetic Polynucleotide
  source 1..23: mol_type = other DNA
ctgcyctccacgtcgccccgggg

SEQ ID NO: 1759 - DNA, 23 bp, synthetic construct
  misc_feature 1..23: note = Synthetic Polynucleotide
  source 1..23: mol_type = other DNA
cctgcyctccacgtcgccccggg

SEQ ID NO: 1760 - DNA, 23 bp, synthetic construct
  misc_feature 1..23: note = Synthetic Polynucleotide
  source 1..23: mol_type = other DNA
gcctgcyctccacgtcgccccgg

SEQ ID NO: 1761 - DNA, 23 bp, synthetic construct
  misc_feature 1..23: note = Synthetic Polynucleotide
  source 1..23: mol_type = other DNA
ggaccygcacccggggaaggcgg

SEQ ID NO: 1762 - DNA, 23 bp, synthetic construct
  misc_feature 1..23: note = Synthetic Polynucleotide
  source 1..23: mol_type = other DNA
agagctayagtgttcctaaaagg

SEQ ID NO: 1763 - DNA, 23 bp, synthetic construct
  misc_feature 1..23: note = Synthetic Polynucleotide
  source 1..23: mol_type = other DNA
tgaatycctaaggaagagactgg

SEQ ID NO: 1764 - DNA, 23 bp, synthetic construct
  misc_feature 1..23: note = Synthetic Polynucleotide
  source 1..23: mol_type = other DNA
agcygcaggggcacagggatggg

SEQ ID NO: 1765 - DNA, 23 bp, synthetic construct
  misc_feature 1..23: note = Synthetic Polynucleotide
  source 1..23: mol_type = other DNA
aagcygcaggggcacagggatgg

SEQ ID NO: 1766 - DNA, 23 bp, synthetic construct
  misc_feature 1..23: note = Synthetic Polynucleotide
  source 1..23: mol_type = other DNA
agaatctycaatagacacatcgg

SEQ ID NO: 1767 - DNA, 23 bp, synthetic construct
  misc_feature 1..23: note = Synthetic Polynucleotide
  source 1..23: mol_type = other DNA
atcytgtcatcatcatcaaaggg

SEQ ID NO: 1768 - DNA, 23 bp, synthetic construct
  misc_feature 1..23: note = Synthetic Polynucleotide
  source 1..23: mol_type = other DNA
gatcytgtcatcatcatcaaagg

SEQ ID NO: 1769 - DNA, 23 bp, synthetic construct
  misc_feature 1..23: note = Synthetic Polynucleotide
  source 1..23: mol_type = other DNA
tcatcygtttgcctgctaagcgg

SEQ ID NO: 1770 - DNA, 23 bp, synthetic construct
  misc_feature 1..23: note = Synthetic Polynucleotide
  source 1..23: mol_type = other DNA
ccgacyccaccttgggcagctgg

SEQ ID NO: 1771 - DNA, 23 bp, synthetic construct
  misc_feature 1..23: note = Synthetic Polynucleotide
  source 1..23: mol_type = other DNA
attcayatctgcctccatgttgg

SEQ ID NO: 1772 - DNA, 23 bp, synthetic construct
  misc_feature 1..23: note = Synthetic Polynucleotide
  source 1..23: mol_type = other DNA
attcaccyaccgacaaggatagg

SEQ ID NO: 1773 - DNA, 23 bp, synthetic construct
  misc_feature 1..23: note = Synthetic Polynucleotide
  source 1..23: mol_type = other DNA
gaagtcgytgtcaaacaggaagg

SEQ ID NO: 1774 - DNA, 23 bp, synthetic construct
  misc_feature 1..23: note = Synthetic Polynucleotide
  source 1..23: mol_type = other DNA
tgacctyactgggtggtgacggg

SEQ ID NO: 1775 - DNA, 23 bp, synthetic construct
  misc_feature 1..23: note = Synthetic Polynucleotide
  source 1..23: mol_type = other DNA
atgacctyactgggtggtgacgg

SEQ ID NO: 1776 - DNA, 23 bp, synthetic construct
  misc_feature 1..23: note = Synthetic Polynucleotide
  source 1..23: mol_type = other DNA
cagcygccaatggttccagttgg

SEQ ID NO: 1777 - DNA, 23 bp, synthetic construct
  misc_feature 1..23: note = Synthetic Polynucleotide
  source 1..23: mol_type = other DNA
cctccyccccagactgaagccgg

SEQ ID NO: 1778 - DNA, 23 bp, synthetic construct
  misc_feature 1..23: note = Synthetic Polynucleotide
  source 1..23: mol_type = other DNA
caccytggggacaccaggtcggg

SEQ ID NO: 1779 - DNA, 23 bp, synthetic construct
  misc_feature 1..23: note = Synthetic Polynucleotide
  source 1..23: mol_type = other DNA
tcaccytggggacaccaggtcgg

SEQ ID NO: 1780 - DNA, 23 bp, synthetic construct
  misc_feature 1..23: note = Synthetic Polynucleotide
  source 1..23: mol_type = other DNA
ccaactyacgagccacctacagg

SEQ ID NO: 1781 - DNA, 23 bp, synthetic construct
  misc_feature 1..23: note = Synthetic Polynucleotide
  source 1..23: mol_type = other DNA
atcyctcagcaaactcagcacgg

SEQ ID NO: 1782 - DNA, 23 bp, synthetic construct
  misc_feature 1..23: note = Synthetic Polynucleotide
  source 1..23: mol_type = other DNA
cctcyctcaccacgttgcccagg

SEQ ID NO: 1783 - DNA, 23 bp, synthetic construct
  misc_feature 1..23: note = Synthetic Polynucleotide
  source 1..23: mol_type = other DNA
ataggcayagatattgtcccagg

SEQ ID NO: 1784 - DNA, 23 bp, synthetic construct
  misc_feature 1..23: note = Synthetic Polynucleotide
  source 1..23: mol_type = other DNA
gctgyggcaacagaggccttcgg

SEQ ID NO: 1785 - DNA, 23 bp, synthetic construct
  misc_feature 1..23: note = Synthetic Polynucleotide
  source 1..23: mol_type = other DNA
acttaycctggggagaaggatgg

SEQ ID NO: 1786 - DNA, 23 bp, synthetic construct
  misc_feature 1..23: note = Synthetic Polynucleotide
  source 1..23: mol_type = other DNA
agaaycattcttgatgtctctgg

SEQ ID NO: 1787 - DNA, 23 bp, synthetic construct
  misc_feature 1..23: note = Synthetic Polynucleotide
  source 1..23: mol_type = other DNA
gttcytaccacttaaagacgagg

SEQ ID NO: 1788 - DNA, 23 bp, synthetic construct
  misc_feature 1..23: note = Synthetic Polynucleotide
  source 1..23: mol_type = other DNA
ttcttcgyggactgcaaacaagg

SEQ ID NO: 1789 - DNA, 23 bp, synthetic construct
  misc_feature 1..23: note = Synthetic Polynucleotide
  source 1..23: mol_type = other DNA
agcaacygcagaaaaaagagggg

SEQ ID NO: 1790 - DNA, 23 bp, synthetic construct
  misc_feature 1..23: note = Synthetic Polynucleotide
  source 1..23: mol_type = other DNA
cagcaacygcagaaaaaagaggg

SEQ ID NO: 1791 - DNA, 23 bp, synthetic construct
  misc_feature 1..23: note = Synthetic Polynucleotide
  source 1..23: mol_type = other DNA
ccaccygaggcaggggcggcagg

SEQ ID NO: 1792 - DNA, 23 bp, synthetic construct
  misc_feature 1..23: note = Synthetic Polynucleotide
  source 1..23: mol_type = other DNA
cgttacygaaactcctgtgtagg

SEQ ID NO: 1793 - DNA, 23 bp, synthetic construct
  misc_feature 1..23: note = Synthetic Polynucleotide
  source 1..23: mol_type = other DNA
cgttcccygaggcaaaagagggg

SEQ ID NO: 1794 - DNA, 23 bp, synthetic construct
  misc_feature 1..23: note = Synthetic Polynucleotide
  source 1..23: mol_type = other DNA
acttycccctaggcggaaagggg

SEQ ID NO: 1795 - DNA, 23 bp, synthetic construct
  misc_feature 1..23: note = Synthetic Polynucleotide
  source 1..23: mol_type = other DNA
gacttycccctaggcggaaaggg

SEQ ID NO: 1796 - DNA, 23 bp, synthetic construct
  misc_feature 1..23: note = Synthetic Polynucleotide
  source 1..23: mol_type = other DNA
ggacttycccctaggcggaaagg

SEQ ID NO: 1797 - DNA, 23 bp, synthetic construct
  misc_feature 1..23: note = Synthetic Polynucleotide
  source 1..23: mol_type = other DNA
ctcyctgccacgtaatacagggg

SEQ ID NO: 1798 - DNA, 23 bp, synthetic construct
  misc_feature 1..23: note = Synthetic Polynucleotide
  source 1..23: mol_type = other DNA
actcyctgccacgtaatacaggg

SEQ ID NO: 1799 - DNA, 23 bp, synthetic construct
  misc_feature 1..23: note = Synthetic Polynucleotide
  source 1..23: mol_type = other DNA
aactcyctgccacgtaatacagg

SEQ ID NO: 1800 - DNA, 23 bp, synthetic construct
  misc_feature 1..23: note = Synthetic Polynucleotide
  source 1..23: mol_type = other DNA
gggtcgyagcgaactgagaaggg

SEQ ID NO: 1801 - DNA, 23 bp, synthetic construct
  misc_feature 1..23: note = Synthetic Polynucleotide
  source 1..23: mol_type = other DNA
tgggtcgyagcgaactgagaagg

SEQ ID NO: 1802 - DNA, 23 bp, synthetic construct
  misc_feature 1..23: note = Synthetic Polynucleotide
  source 1..23: mol_type = other DNA
ggatgycctgctcggtgggctgg

SEQ ID NO: 1803 - DNA, 23 bp, synthetic construct
  misc_feature 1..23: note = Synthetic Polynucleotide
  source 1..23: mol_type = other DNA
ccgcayggggccgaagtctgggg

SEQ ID NO: 1804 - DNA, 23 bp, synthetic construct
  misc_feature 1..23: note = Synthetic Polynucleotide
  source 1..23: mol_type = other DNA
gccgcayggggccgaagtctggg

SEQ ID NO: 1805 - DNA, 23 bp, synthetic construct
  misc_feature 1..23: note = Synthetic Polynucleotide
  source 1..23: mol_type = other DNA
agccgcayggggccgaagtctgg

SEQ ID NO: 1806 - DNA, 23 bp, synthetic construct
  misc_feature 1..23: note = Synthetic Polynucleotide
  source 1..23: mol_type = other DNA
gtacttgyagtcggggtagtcgg

SEQ ID NO: 1807 - DNA, 23 bp, synthetic construct
  misc_feature 1..23: note = Synthetic Polynucleotide
  source 1..23: mol_type = other DNA
ttgytcccccctcggcctcaggg

SEQ ID NO: 1808 - DNA, 23 bp, synthetic construct
  misc_feature 1..23: note = Synthetic Polynucleotide
  source 1..23: mol_type = other DNA
attgytcccccctcggcctcagg

SEQ ID NO: 1809 - DNA, 23 bp, synthetic construct
  misc_feature 1..23: note = Synthetic Polynucleotide
  source 1..23: mol_type = other DNA
ctccyggtgctgaaggacttggg

SEQ ID NO: 1810 - DNA, 23 bp, synthetic construct
  misc_feature 1..23: note = Synthetic Polynucleotide
  source 1..23: mol_type = other DNA
gctccyggtgctgaaggacttgg

SEQ ID NO: 1811 - DNA, 23 bp, synthetic construct
  misc_feature 1..23: note = Synthetic Polynucleotide
  source 1..23: mol_type = other DNA
aatcaygatgtacatccttctgg

SEQ ID NO: 1812 - DNA, 23 bp, synthetic construct
  misc_feature 1..23: note = Synthetic Polynucleotide
  source 1..23: mol_type = other DNA
gataycggtttcattaaggtagg

SEQ ID NO: 1813 - DNA, 23 bp, synthetic construct
  misc_feature 1..23: note = Synthetic Polynucleotide
  source 1..23: mol_type = other DNA
ccacgygctgcgctggctggagg

SEQ ID NO: 1814 - DNA, 23 bp, synthetic construct
  misc_feature 1..23: note = Synthetic Polynucleotide
  source 1..23: mol_type = other DNA
acttcycaccgggtagctcccgg

SEQ ID NO: 1815 - DNA, 23 bp, synthetic construct
  misc_feature 1..23: note = Synthetic Polynucleotide
  source 1..23: mol_type = other DNA
gcayactggcggatggtccaggg

SEQ ID NO: 1816 - DNA, 23 bp, synthetic construct
  misc_feature 1..23: note = Synthetic Polynucleotide
  source 1..23: mol_type = other DNA
agcayactggcggatggtccagg

SEQ ID NO: 1817 - DNA, 23 bp, synthetic construct
  misc_feature 1..23: note = Synthetic Polynucleotide
  source 1..23: mol_type = other DNA
gttccyggaaagcattaagaagg

SEQ ID NO: 1818 - DNA, 23 bp, synthetic construct
  misc_feature 1..23: note = Synthetic Polynucleotide
  source 1..23: mol_type = other DNA
tagcaygaagacggtgaagacgg

SEQ ID NO: 1819 - DNA, 23 bp, synthetic construct
  misc_feature 1..23: note = Synthetic Polynucleotide
  source 1..23: mol_type = other DNA
cgtacyggcggatgccttcccgg

SEQ ID NO: 1820 - DNA, 23 bp, synthetic construct
  misc_feature 1..23: note = Synthetic Polynucleotide
  source 1..23: mol_type = other DNA
aggcccygaggaagcagggacgg

SEQ ID NO: 1821 - DNA, 23 bp, synthetic construct
  misc_feature 1..23: note = Synthetic Polynucleotide
  source 1..23: mol_type = other DNA
ctcayggcacttacctgggatgg

SEQ ID NO: 1822 - DNA, 23 bp, synthetic construct
  misc_feature 1..23: note = Synthetic Polynucleotide
  source 1..23: mol_type = other DNA
tcacagcygcggggaaagggagg

SEQ ID NO: 1823 - DNA, 23 bp, synthetic construct
  misc_feature 1..23: note = Synthetic Polynucleotide
  source 1..23: mol_type = other DNA
ggtaccyggaagacacgaggggg

SEQ ID NO: 1824 - DNA, 23 bp, synthetic construct
  misc_feature 1..23: note = Synthetic Polynucleotide
  source 1..23: mol_type = other DNA
tggtaccyggaagacacgagggg

SEQ ID NO: 1825 - DNA, 23 bp, synthetic construct
  misc_feature 1..23: note = Synthetic Polynucleotide
  source 1..23: mol_type = other DNA
tgccaytgtaattcccacacagg

SEQ ID NO: 1826 - DNA, 23 bp, synthetic construct
  misc_feature 1..23: note = Synthetic Polynucleotide
  source 1..23: mol_type = other DNA
attycaatggcttctgggtctgg

SEQ ID NO: 1827 - DNA, 23 bp, synthetic construct
  misc_feature 1..23: note = Synthetic Polynucleotide
  source 1..23: mol_type = other DNA
atayctggccgcgcttccccagg

SEQ ID NO: 1828 - DNA, 23 bp, synthetic construct
  misc_feature 1..23: note = Synthetic Polynucleotide
  source 1..23: mol_type = other DNA
cgctcaygctgcaggctggacgg

SEQ ID NO: 1829 - DNA, 23 bp, synthetic construct
  misc_feature 1..23: note = Synthetic Polynucleotide
  source 1..23: mol_type = other DNA
gtacytgtccccgtagccaatgg

SEQ ID NO: 1830 - DNA, 23 bp, synthetic construct
  misc_feature 1..23: note = Synthetic Polynucleotide
  source 1..23: mol_type = other DNA
gataycatacaggaatgctgggg

SEQ ID NO: 1831 - DNA, 23 bp, synthetic construct
  misc_feature 1..23: note = Synthetic Polynucleotide
  source 1..23: mol_type = other DNA
agataycatacaggaatgctggg

SEQ ID NO: 1832 - DNA, 23 bp, synthetic construct
  misc_feature 1..23: note = Synthetic Polynucleotide
  source 1..23: mol_type = other DNA
tagataycatacaggaatgctgg

SEQ ID NO: 1833 - DNA, 23 bp, synthetic construct
  misc_feature 1..23: note = Synthetic Polynucleotide
  source 1..23: mol_type = other DNA
cacccyaaagaagaagtggtcgg

SEQ ID NO: 1834 - DNA, 23 bp, synthetic construct
  misc_feature 1..23: note = Synthetic Polynucleotide
  source 1..23: mol_type = other DNA
tttacagygggctctagaggggg

SEQ ID NO: 1835 - DNA, 23 bp, synthetic construct
  misc_feature 1..23: note = Synthetic Polynucleotide
  source 1..23: mol_type = other DNA
ctgycttccttcacctctgctgg

SEQ ID NO: 1836 - DNA, 23 bp, synthetic construct
  misc_feature 1..23: note = Synthetic Polynucleotide
  source 1..23: mol_type = other DNA
agccytgggaaggggggcagcgg

SEQ ID NO: 1837 - DNA, 23 bp, synthetic construct
  misc_feature 1..23: note = Synthetic Polynucleotide
  source 1..23: mol_type = other DNA
ggcccggytggtgtaatacacgg

SEQ ID NO: 1838 - DNA, 23 bp, synthetic construct
  misc_feature 1..23: note = Synthetic Polynucleotide
  source 1..23: mol_type = other DNA
gtatcygggagataggacagagg

SEQ ID NO: 1839 - DNA, 23 bp, synthetic construct
  misc_feature 1..23: note = Synthetic Polynucleotide
  source 1..23: mol_type = other DNA
gcaccayggtgcctggcgggagg

SEQ ID NO: 1840 - DNA, 23 bp, synthetic construct
  misc_feature 1..23: note = Synthetic Polynucleotide
  source 1..23: mol_type = other DNA
agatcyccactgtggttgcctgg

SEQ ID NO: 1841 - DNA, 23 bp, synthetic construct
  misc_feature 1..23: note = Synthetic Polynucleotide
  source 1..23: mol_type = other DNA
aggcccaytgccatacaggatgg

SEQ ID NO: 1842 - DNA, 23 bp, synthetic construct
  misc_feature 1..23: note = Synthetic Polynucleotide
  source 1..23: mol_type = other DNA
gcagyccacccacagccccatgg

SEQ ID NO: 1843 - DNA, 23 bp, synthetic construct
  misc_feature 1..23: note = Synthetic Polynucleotide
  source 1..23: mol_type = other DNA
cggcaayggtgtagcggcggggg

SEQ ID NO: 1844 - DNA, 23 bp, synthetic construct
  misc_feature 1..23: note = Synthetic Polynucleotide
  source 1..23: mol_type = other DNA
gcggcaayggtgtagcggcgggg

SEQ ID NO: 1845 - DNA, 23 bp, synthetic construct
  misc_feature 1..23: note = Synthetic Polynucleotide
  source 1..23: mol_type = other DNA
cgactyggagagacgcctgcagg

SEQ ID NO: 1846 - DNA, 23 bp, synthetic construct
  misc_feature 1..23: note = Synthetic Polynucleotide
  source 1..23: mol_type = other DNA
atatcayctagagggaagggggg

SEQ ID NO: 1847 - DNA, 23 bp, synthetic construct
  misc_feature 1..23: note = Synthetic Polynucleotide
  source 1..23: mol_type = other DNA
catatcayctagagggaaggggg

SEQ ID NO: 1848 - DNA, 23 bp, synthetic construct
  misc_feature 1..23: note = Synthetic Polynucleotide
  source 1..23: mol_type = other DNA
cgccagcygcatttcaaagatgg

SEQ ID NO: 1849 - DNA, 23 bp, synthetic construct
  misc_feature 1..23: note = Synthetic Polynucleotide
  source 1..23: mol_type = other DNA
tagcayatttgcaacaagcttgg

SEQ ID NO: 1850 - DNA, 23 bp, synthetic construct
  misc_feature 1..23: note = Synthetic Polynucleotide
  source 1..23: mol_type = other DNA
gcgggyacttggtgtggatgagg

SEQ ID NO: 1851 - DNA, 23 bp, synthetic construct
  misc_feature 1..23: note = Synthetic Polynucleotide
  source 1..23: mol_type = other DNA
ctgycagggtcaggcacacctgg

SEQ ID NO: 1852 - DNA, 23 bp, synthetic construct
  misc_feature 1..23: note = Synthetic Polynucleotide
  source 1..23: mol_type = other DNA
gcagaccygcacaaaatacaagg

SEQ ID NO: 1853 - DNA, 23 bp, synthetic construct
  misc_feature 1..23: note = Synthetic Polynucleotide
  source 1..23: mol_type = other DNA
cttcaygtgcaggaagcggctgg

SEQ ID NO: 1854 - DNA, 23 bp, synthetic construct
  misc_feature 1..23: note = Synthetic Polynucleotide
  source 1..23: mol_type = other DNA
ccacctycatgtgcaggaagcgg

SEQ ID NO: 1855 - DNA, 23 bp, synthetic construct
  misc_feature 1..23: note = Synthetic Polynucleotide
  source 1..23: mol_type = other DNA
ccgttcygtgggtatagagtggg

SEQ ID NO: 1856 - DNA, 23 bp, synthetic construct
  misc_feature 1..23: note = Synthetic Polynucleotide
  source 1..23: mol_type = other DNA
gccgttcygtgggtatagagtgg

SEQ ID NO: 1857 - DNA, 23 bp, synthetic construct
  misc_feature 1..23: note = Synthetic Polynucleotide
  source 1..23: mol_type = other DNA
ctttcygttgaaataaggatggg

SEQ ID NO: 1858 - DNA, 23 bp, synthetic construct
  misc_feature 1..23: note = Synthetic Polynucleotide
  source 1..23: mol_type = other DNA
tctttcygttgaaataaggatgg

SEQ ID NO: 1859 - DNA, 23 bp, synthetic construct
  misc_feature 1..23: note = Synthetic Polynucleotide
  source 1..23: mol_type = other DNA
ggtcttyctgcacatttgggtgg

SEQ ID NO: 1860 - DNA, 23 bp, synthetic construct
  misc_feature 1..23: note = Synthetic Polynucleotide
  source 1..23: mol_type = other DNA
gtgaaccygaaatgagagggagg

SEQ ID NO: 1861 - DNA, 23 bp, synthetic construct
  misc_feature 1..23: note = Synthetic Polynucleotide
  source 1..23: mol_type = other DNA
gtaccygggtgggggccgcaggg

SEQ ID NO: 1862 - DNA, 23 bp, synthetic construct
  misc_feature 1..23: note = Synthetic Polynucleotide
  source 1..23: mol_type = other DNA
tgtaccygggtgggggccgcagg

SEQ ID NO: 1863 - DNA, 23 bp, synthetic construct
  misc_feature 1..23: note = Synthetic Polynucleotide
  source 1..23: mol_type = other DNA
tcayctttcatgggctcttttgg

SEQ ID NO: 1864 - DNA, 23 bp, synthetic construct
  misc_feature 1..23: note = Synthetic Polynucleotide
  source 1..23: mol_type = other DNA
tatttyacatagttggaatgtgg

SEQ ID NO: 1865 - DNA, 23 bp, synthetic construct
  misc_feature 1..23: note = Synthetic Polynucleotide
  source 1..23: mol_type = other DNA
ggccaayttcctgtaattggggg

SEQ ID NO: 1866 - DNA, 23 bp, synthetic construct
  misc_feature 1..23: note = Synthetic Polynucleotide
  source 1..23: mol_type = other DNA
aggccaayttcctgtaattgggg

SEQ ID NO: 1867 - DNA, 23 bp, synthetic construct
  misc_feature 1..23: note = Synthetic Polynucleotide
  source 1..23: mol_type = other DNA
tccayggcgggtgcgggctcagg

SEQ ID NO: 1868 - DNA, 23 bp, synthetic construct
  misc_feature 1..23: note = Synthetic Polynucleotide
  source 1..23: mol_type = other DNA
aggcgtygaccagcgagtacagg

SEQ ID NO: 1869 - DNA, 55 bp, synthetic construct
  misc_feature 1..55: note = Synthetic Polynucleotide
  source 1..55: mol_type = other DNA
acactctttccctacacgacgctcttccgatctnnnngtcagtctcggcccctca

SEQ ID NO: 1870 - DNA, 49 bp, synthetic construct
  misc_feature 1..49: note = Synthetic Polynucleotide
  source 1..49: mol_type = other DNA
tggagttcagacgtgtgctcttccgatctgccactgtaaagctcttggg

SEQ ID NO: 1871 - DNA, 58 bp, synthetic construct
  misc_feature 1..58: note = Synthetic Polynucleotide
  source 1..58: mol_type = other DNA
acactctttccctacacgaacgctcttccgatctnnnnagggtagagggacagagctg

SEQ ID NO: 1872 - DNA, 49 bp, synthetic construct
  misc_feature 1..49: note = Synthetic Polynucleotide
  source 1..49: mol_type = other DNA
tggagttcagacgtgtgctcttccgatctggaccccacatagtcagtgc

SEQ ID NO: 1873 - DNA, 58 bp, synthetic construct
  misc_feature 1..58: note = Synthetic Polynucleotide
  source 1..58: mol_type = other DNA
acactctttccctacacgacgctcttccgatctnnnngctgtcagccctatctccatc

SEQ ID NO: 1874 - DNA, 49 bp, synthetic construct
  misc_feature 1..49: note = Synthetic Polynucleotide
  source 1..49: mol_type = other DNA
tggagttcagacgtgtgctcttccgatcttgggcaattaggacagggac

SEQ ID NO: 1875 - DNA, 57 bp, synthetic construct
  misc_feature 1..57: note = Synthetic Polynucleotide
  source 1..57: mol_type = other DNA
acactctttccctacacgacgctcttccgatctnnnngcagcggaggaggtagattg

SEQ ID NO: 1876 - DNA, 49 bp, synthetic construct
  misc_feature 1..49: note = Synthetic Polynucleotide
  source 1..49: mol_type = other DNA
tggagttcagacgtgtgctcttccgatctctcagtacctggagtcccga

SEQ ID NO: 1877 - DNA, 57 bp, synthetic construct
  misc_feature 1..57: note = Synthetic Polynucleotide
  source 1..57: mol_type = other DNA
acactctttccctacacgacgctcttccgatctnnnngacaggctcaggaaagctgt

SEQ ID NO: 1878 - DNA, 49 bp, synthetic construct
  misc_feature 1..49: note = Synthetic Polynucleotide
  source 1..49: mol_type = other DNA
tggagttcagacgtgtgctcttccgatctacacaagcctttctccaggg

SEQ ID NO: 1879 - DNA, 57 bp, synthetic construct
  misc_feature 1..57: note = Synthetic Polynucleotide
  source 1..57: mol_type = other DNA
acactctttccctacacgacgctcttccgatctnnnnaatagggggtgagactgggg

SEQ ID NO: 1880 - DNA, 49 bp, synthetic construct
  misc_feature 1..49: note = Synthetic Polynucleotide
  source 1..49: mol_type = other DNA
tggagttcagacgtgtgctcttccgatctgcctcagacgagacttgagg

SEQ ID NO: 1881 - DNA, 57 bp, synthetic construct
  misc_feature 1..57: note = Synthetic Polynucleotide
  source 1..57: mol_type = other DNA
acactctttccctacacgacgctcttccgatctnnnnggccagcaggaaaggaatct

SEQ ID NO: 1882 - DNA, 49 bp, synthetic construct
  misc_feature 1..49: note = Synthetic Polynucleotide
  source 1..49: mol_type = other DNA
tggagttcagacgtgtgctcttccgatcttgactgcacctgtagccatg

SEQ ID NO: 1883 - DNA, 57 bp, synthetic construct
  misc_feature 1..57: note = Synthetic Polynucleotide
  source 1..57: mol_type = other DNA
acactctttccctacacgacgctcttccgatctnnnntcaaggaaatcaccctgccc

SEQ ID NO: 1884 - DNA, 49 bp, synthetic construct
  misc_feature 1..49: note = Synthetic Polynucleotide
  source 1..49: mol_type = other DNA
tggagttcagacgtgtgctcttccgatctaacttccttggtgtgcagct

SEQ ID NO: 1885 - DNA, 57 bp, synthetic construct
  misc_feature 1..57: note = Synthetic Polynucleotide
  source 1..57: mol_type = other DNA
acactctttccctacacgacgctcttccgatctnnnnatgggctcagctacgtcatg

SEQ ID NO: 1886 - DNA, 49 bp, synthetic construct
  misc_feature 1..49: note = Synthetic Polynucleotide
  source 1..49: mol_type = other DNA
tggagttcagacgtgtgctcttccgatctaatcgcagtgtggtgggcaa

SEQ ID NO: 1887 - DNA, 57 bp, synthetic construct
  misc_feature 1..57: note = Synthetic Polynucleotide
  source 1..57: mol_type = other DNA
acactctttccctacacgacgctcttccgatctnnnncgcacatcccttgtctctct

SEQ ID NO: 1888 - DNA, 49 bp, synthetic construct
  misc_feature 1..49: note = Synthetic Polynucleotide
  source 1..49: mol_type = other DNA
tggagttcagacgtgtgctcttccgatctctactggagcacaccccaag

SEQ ID NO: 1889 - DNA, 57 bp, synthetic construct
  misc_feature 1..57: note = Synthetic Polynucleotide
  source 1..57: mol_type = other DNA
acactctttccctacacgacgctcttccgatctnnnntgggtcacgtagctttggtc

SEQ ID NO: 1890 - DNA, 48 bp, synthetic construct
  misc_feature 1..48: note = Synthetic Polynucleotide
  source 1..48: mol_type = other DNA
tggagttcagacgtgtgctcttccgatcttgtggccatgtgcaactaa

SEQ ID NO: 1891 - DNA, 57 bp, synthetic construct
  misc_feature 1..57: note = Synthetic Polynucleotide
  source 1..57: mol_type = other DNA
acactctttccctacacgacgctcttccgatctnnnnctactacgtgccagctcagg

SEQ ID NO: 1892 - DNA, 49 bp, synthetic construct
  misc_feature 1..49: note = Synthetic Polynucleotide
  source 1..49: mol_type = other DNA
tggagttcagacgtgtgctcttccgatctacctcccctcctcactaacc

SEQ ID NO: 1893 - DNA, 57 bp, synthetic construct
  misc_feature 1..57: note = Synthetic Polynucleotide
  source 1..57: mol_type = other DNA
acactctttccctacacgacgctcttccgatctnnnngcctcagctccatttcctgt

SEQ ID NO: 1894 - DNA, 49 bp, synthetic construct
  misc_feature 1..49: note = Synthetic Polynucleotide
  source 1..49: mol_type = other DNA
tggagttcagacgtgtgctcttccgatctaacctttatggcaccagggg

SEQ ID NO: 1895 - DNA, 57 bp, synthetic construct
  misc_feature 1..57: note = Synthetic Polynucleotide
  source 1..57: mol_type = other DNA
acactctttccctacacgacgctcttccgatctnnnngagctcagcattagcaggct

SEQ ID NO: 1896 - DNA, 49 bp, synthetic construct
  misc_feature 1..49: note = Synthetic Polynucleotide
  source 1..49: mol_type = other DNA
tggagttcagacgtgtgctcttccgatctttcctggctttccgattccc

SEQ ID NO: 1897 - DNA, 57 bp, synthetic construct
  misc_feature 1..57: note = Synthetic Polynucleotide
  source 1..57: mol_type = other DNA
acactctttccctacacgacgctcttccgatctnnnngtgcaattggaggaggagct

SEQ ID NO: 1898 - DNA, 49 bp, synthetic construct
  misc_feature 1..49: note = Synthetic Polynucleotide
  source 1..49: mol_type = other DNA
tggagttcagacgtgtgctcttccgatctcaccagctacaggcagaaca

SEQ ID NO: 1899 - DNA, 57 bp, synthetic construct
  misc_feature 1..57: note = Synthetic Polynucleotide
  source 1..57: mol_type = other DNA
acactctttccctacacgacgctcttccgatctnnnncctacccccaacacagatgg

SEQ ID NO: 1900 - DNA, 49 bp, synthetic construct
  misc_feature 1..49: note = Synthetic Polynucleotide
  source 1..49: mol_type = other DNA
tggagttcagacgtgtgctcttccgatctccacacaactcaggtcctcc

SEQ ID NO: 1901-1913 - skipped (13 entries)

SEQ ID NO: 1914 - DNA, 23 bp, synthetic construct
  misc_feature 1..23: note = Synthetic Polynucleotide
  source 1..23: mol_type = other DNA
cttaggyaagtaatgcaatatgg

SEQ ID NO: 1915 - DNA, 23 bp, synthetic construct
  misc_feature 1..23: note = Synthetic Polynucleotide
  source 1..23: mol_type = other DNA
tcatattyacaggcttgtaaagg

SEQ ID NO: 1916 - DNA, 23 bp, synthetic construct
  misc_feature 1..23: note = Synthetic Polynucleotide
  source 1..23: mol_type = other DNA
cagttagygattggcaactttgg

SEQ ID NO: 1917 - DNA, 23 bp, synthetic construct
  misc_feature 1..23: note = Synthetic Polynucleotide
  source 1..23: mol_type = other DNA
ccaygatggcggcgcggcggcgg

SEQ ID NO: 1918 - DNA, 23 bp, synthetic construct
  misc_feature 1..23: note = Synthetic Polynucleotide
  source 1..23: mol_type = other DNA
gaaggygtggtagggaggcacgg

SEQ ID NO: 1919 - DNA, 23 bp, synthetic construct
  misc_feature 1..23: note = Synthetic Polynucleotide
  source 1..23: mol_type = other DNA
aaggygtggtagggaggcacggg

SEQ ID NO: 1920 - DNA, 23 bp, synthetic construct
  misc_feature 1..23: note = Synthetic Polynucleotide
  source 1..23: mol_type = other DNA
aggygtggtagggaggcacgggg

SEQ ID NO: 1921 - DNA, 23 bp, synthetic construct
  misc_feature 1..23: note = Synthetic Polynucleotide
  source 1..23: mol_type = other DNA
atcattgygagtgtattataagg

SEQ ID NO: 1922 - DNA, 23 bp, synthetic construct
  misc_feature 1..23: note = Synthetic Polynucleotide
  source 1..23: mol_type = other DNA
tcattgygagtgtattataaggg

SEQ ID NO: 1923 - DNA, 23 bp, synthetic construct
  misc_feature 1..23: note = Synthetic Polynucleotide
  source 1..23: mol_type = other DNA
cattgygagtgtattataagggg

SEQ ID NO: 1924 - DNA, 23 bp, synthetic construct
  misc_feature 1..23: note = Synthetic Polynucleotide
  source 1..23: mol_type = other DNA
ccagaytgtcagcaaacacctgg

SEQ ID NO: 1925 - DNA, 23 bp, synthetic construct
  misc_feature 1..23: note = Synthetic Polynucleotide
  source 1..23: mol_type = other DNA
gttataygtgccaatgtgactgg

SEQ ID NO: 1926 - DNA, 23 bp, synthetic construct
  misc_feature 1..23: note = Synthetic Polynucleotide
  source 1..23: mol_type = other DNA
cgtaataygggaaaaaggcgtgg

SEQ ID NO: 1927 - DNA, 23 bp, synthetic construct
  misc_feature 1..23: note = Synthetic Polynucleotide
  source 1..23: mol_type = other DNA
aataygggaaaaaggcgtggtgg

SEQ ID NO: 1928 - DNA, 23 bp, synthetic construct
  misc_feature 1..23: note = Synthetic Polynucleotide
  source 1..23: mol_type = other DNA
ataygggaaaaaggcgtggtggg

SEQ ID NO: 1929 - DNA, 23 bp, synthetic construct
  misc_feature 1..23: note = Synthetic Polynucleotide
  source 1..23: mol_type = other DNA
cctaaaaygttggatgctgaagg

SEQ ID NO: 1930 - DNA, 23 bp, synthetic construct
  misc_feature 1..23: note = Synthetic Polynucleotide
  source 1..23: mol_type = other DNA
acaagatygtctacagaaacagg

SEQ ID NO: 1931 - DNA, 23 bp, synthetic construct
  misc_feature 1..23: note = Synthetic Polynucleotide
  source 1..23: mol_type = other DNA
aagygattgcagcagtgaaatgg

SEQ ID NO: 1932 - DNA, 23 bp, synthetic construct
  misc_feature 1..23: note = Synthetic Polynucleotide
  source 1..23: mol_type = other DNA
tgtaatayttctgatcatgttgg

SEQ ID NO: 1933 - DNA, 23 bp, synthetic construct
  misc_feature 1..23: note = Synthetic Polynucleotide
  source 1..23: mol_type = other DNA
agaagaygctgtttaatctgagg

SEQ ID NO: 1934 - DNA, 23 bp, synthetic construct
  misc_feature 1..23: note = Synthetic Polynucleotide
  source 1..23: mol_type = other DNA
ttcyatgatcttcgaggagaggg

SEQ ID NO: 1935 - DNA, 23 bp, synthetic construct
  misc_feature 1..23: note = Synthetic Polynucleotide
  source 1..23: mol_type = other DNA
tccagyaagttataaaatttggg

SEQ ID NO: 1936 - DNA, 23 bp, synthetic construct
  misc_feature 1..23: note = Synthetic Polynucleotide
  source 1..23: mol_type = other DNA
ttcyggtttgtcttatattctgg

SEQ ID NO: 1937 - DNA, 23 bp, synthetic construct
  misc_feature 1..23: note = Synthetic Polynucleotide
  source 1..23: mol_type = other DNA
aagygtgtgcctgtgtgccgagg

SEQ ID NO: 1938 - DNA, 23 bp, synthetic construct
  misc_feature 1..23: note = Synthetic Polynucleotide
  source 1..23: mol_type = other DNA
acaaggygagcgtgggctgctgg

SEQ ID NO: 1939 - DNA, 23 bp, synthetic construct
  misc_feature 1..23: note = Synthetic Polynucleotide
  source 1..23: mol_type = other DNA
caaggygagcgtgggctgctggg

SEQ ID NO: 1940 - DNA, 23 bp, synthetic construct
  misc_feature 1..23: note = Synthetic Polynucleotide
  source 1..23: mol_type = other DNA
gacaytgatgaatgtcgctatgg

SEQ ID NO: 1941 - DNA, 23 bp, synthetic construct
  misc_feature 1..23: note = Synthetic Polynucleotide
  source 1..23: mol_type = other DNA
ctcaayagatgccatctccctgg

SEQ ID NO: 1942 - DNA, 23 bp, synthetic construct
  misc_feature 1..23: note = Synthetic Polynucleotide
  source 1..23: mol_type = other DNA
agctayggccgcagtgattctgg

SEQ ID NO: 1943 - DNA, 23 bp, synthetic construct
  misc_feature 1..23: note = Synthetic Polynucleotide
  source 1..23: mol_type = other DNA
agcygtgggacaagagcagccgg

SEQ ID NO: 1944 - DNA, 23 bp, synthetic construct
  misc_feature 1..23: note = Synthetic Polynucleotide
  source 1..23: mol_type = other DNA
caagaaaygtgctgctgatctgg

SEQ ID NO: 1945 - DNA, 23 bp, synthetic construct
  misc_feature 1..23: note = Synthetic Polynucleotide
  source 1..23: mol_type = other DNA
aagaaaygtgctgctgatctggg

SEQ ID NO: 1946 - DNA, 23 bp, synthetic construct
  misc_feature 1..23: note = Synthetic Polynucleotide
  source 1..23: mol_type = other DNA
cactggayatggaaatagagagg

SEQ ID NO: 1947 - DNA, 23 bp, synthetic construct
  misc_feature 1..23: note = Synthetic Polynucleotide
  source 1..23: mol_type = other DNA
actgataycaggtgagagccagg

SEQ ID NO: 1948 - DNA, 23 bp, synthetic construct
  misc_feature 1..23: note = Synthetic Polynucleotide
  source 1..23: mol_type = other DNA
acagttayaggttctggtcctgg

SEQ ID NO: 1949 - DNA, 23 bp, synthetic construct
  misc_feature 1..23: note = Synthetic Polynucleotide
  source 1..23: mol_type = other DNA
gttayaggttctggtcctggagg

SEQ ID NO: 1950 - DNA, 23 bp, synthetic construct
  misc_feature 1..23: note = Synthetic Polynucleotide
  source 1..23: mol_type = other DNA
ctgtgagygtgcccaggggcggg

SEQ ID NO: 1951 - DNA, 23 bp, synthetic construct
  misc_feature 1..23: note = Synthetic Polynucleotide
  source 1..23: mol_type = other DNA
tgagygtgcccaggggcgggcgg

SEQ ID NO: 1952 - DNA, 23 bp, synthetic construct
  misc_feature 1..23: note = Synthetic Polynucleotide
  source 1..23: mol_type = other DNA
acattygggcttttggtaagtgg

SEQ ID NO: 1953 - DNA, 23 bp, synthetic construct
  misc_feature 1..23: note = Synthetic Polynucleotide
  source 1..23: mol_type = other DNA
gagaggygagaagagggaagcgg

SEQ ID NO: 1954 - DNA, 23 bp, synthetic construct
  misc_feature 1..23: note = Synthetic Polynucleotide
  source 1..23: mol_type = other DNA
aaaggygggcctgggacctgagg

SEQ ID NO: 1955 - DNA, 23 bp, synthetic construct
  misc_feature 1..23: note = Synthetic Polynucleotide
  source 1..23: mol_type = other DNA
cacgygagtggccatcctcaggg

SEQ ID NO: 1956 - DNA, 23 bp, synthetic construct
  misc_feature 1..23: note = Synthetic Polynucleotide
  source 1..23: mol_type = other DNA
ggagayggcctccatgaaggagg

SEQ ID NO: 1957 - DNA, 23 bp, synthetic construct
  misc_feature 1..23: note = Synthetic Polynucleotide
  source 1..23: mol_type = other DNA
ggctgatyacctcacgctccagg

SEQ ID NO: 1958 - DNA, 23 bp, synthetic construct
  misc_feature 1..23: note = Synthetic Polynucleotide
  source 1..23: mol_type = other DNA
agcyggggactggacaatttggg

SEQ ID NO: 1959 - DNA, 23 bp, synthetic construct
  misc_feature 1..23: note = Synthetic Polynucleotide
  source 1..23: mol_type = other DNA
atcaytggggtggatcccgaagg

SEQ ID NO: 1960 - DNA, 23 bp, synthetic construct
  misc_feature 1..23: note = Synthetic Polynucleotide
  source 1..23: mol_type = other DNA
tcaytggggtggatcccgaaggg

SEQ ID NO: 1961 - DNA, 23 bp, synthetic construct
  misc_feature 1..23: note = Synthetic Polynucleotide
  source 1..23: mol_type = other DNA
gcagygtgagctgctcctggagg

SEQ ID NO: 1962 - DNA, 23 bp, synthetic construct
  misc_feature 1..23: note = Synthetic Polynucleotide
  source 1..23: mol_type = other DNA
ggcyatatacaactacgcaaagg

SEQ ID NO: 1963 - DNA, 23 bp, synthetic construct
  misc_feature 1..23: note = Synthetic Polynucleotide
  source 1..23: mol_type = other DNA
atgtatyaattacagacacttgg

SEQ ID NO: 1964 - DNA, 23 bp, synthetic construct
  misc_feature 1..23: note = Synthetic Polynucleotide
  source 1..23: mol_type = other DNA
atcatggyaagcaagaaacaagg

SEQ ID NO: 1965 - DNA, 23 bp, synthetic construct
  misc_feature 1..23: note = Synthetic Polynucleotide
  source 1..23: mol_type = other DNA
ggcyagaaatctgttgctatggg

SEQ ID NO: 1966 - DNA, 23 bp, synthetic construct
  misc_feature 1..23: note = Synthetic Polynucleotide
  source 1..23: mol_type = other DNA
ggaagyggcgtgctgtgctgagg

SEQ ID NO: 1967 - DNA, 23 bp, synthetic construct
  misc_feature 1..23: note = Synthetic Polynucleotide
  source 1..23: mol_type = other DNA
gtcytaggccccaaaaattttgg

SEQ ID NO: 1968 - DNA, 23 bp, synthetic construct
  misc_feature 1..23: note = Synthetic Polynucleotide
  source 1..23: mol_type = other DNA
gccagayactttgtgaagtaagg

SEQ ID NO: 1969 - DNA, 23 bp, synthetic construct
  misc_feature 1..23: note = Synthetic Polynucleotide
  source 1..23: mol_type = other DNA
agcyggtattccctctcgagtgg

SEQ ID NO: 1970 - DNA, 23 bp, synthetic construct
  misc_feature 1..23: note = Synthetic Polynucleotide
  source 1..23: mol_type = other DNA
gtcgagaygctggccagctacgg

SEQ ID NO: 1971 - DNA, 23 bp, synthetic construct
  misc_feature 1..23: note = Synthetic Polynucleotide
  source 1..23: mol_type = other DNA
tcgagaygctggccagctacggg

SEQ ID NO: 1972 - DNA, 23 bp, synthetic construct
  misc_feature 1..23: note = Synthetic Polynucleotide
  source 1..23: mol_type = other DNA
aagayggtgacagaaaaggcagg

SEQ ID NO: 1973 - DNA, 23 bp, synthetic construct
  misc_feature 1..23: note = Synthetic Polynucleotide
  source 1..23: mol_type = other DNA
agatayggcttctaaaccgaagg

SEQ ID NO: 1974 - DNA, 23 bp, synthetic construct
  misc_feature 1..23: note = Synthetic Polynucleotide
  source 1..23: mol_type = other DNA
cacytgtgaggaagttcctgggg

SEQ ID NO: 1975 - DNA, 23 bp, synthetic construct
  misc_feature 1..23: note = Synthetic Polynucleotide
  source 1..23: mol_type = other DNA
tctgyggaccaaaatcattctgg

SEQ ID NO: 1976 - DNA, 23 bp, synthetic construct
  misc_feature 1..23: note = Synthetic Polynucleotide
  source 1..23: mol_type = other DNA
caagaayagtaggtaaggccagg

SEQ ID NO: 1977 - DNA, 23 bp, synthetic construct
  misc_feature 1..23: note = Synthetic Polynucleotide
  source 1..23: mol_type = other DNA
ttgayagggagcaagcagttcgg

SEQ ID NO: 1978 - DNA, 23 bp, synthetic construct
  misc_feature 1..23: note = Synthetic Polynucleotide
  source 1..23: mol_type = other DNA
tgayagggagcaagcagttcggg

SEQ ID NO: 1979 - DNA, 23 bp, synthetic construct
  misc_feature 1..23: note = Synthetic Polynucleotide
  source 1..23: mol_type = other DNA
tttytttttttttttttttgagg

SEQ ID NO: 1980 - DNA, 23 bp, synthetic construct
  misc_feature 1..23: note = Synthetic Polynucleotide
  source 1..23: mol_type = other DNA
tgatgygaggctgccgccgcagg

SEQ ID NO: 1981 - DNA, 23 bp, synthetic construct
  misc_feature 1..23: note = Synthetic Polynucleotide
  source 1..23: mol_type = other DNA
gtcaygaaaaagccaagatgcgg

SEQ ID NO: 1982 - DNA, 23 bp, synthetic construct
  misc_feature 1..23: note = Synthetic Polynucleotide
  source 1..23: mol_type = other DNA
tcaygaaaaagccaagatgcggg

SEQ ID NO: 1983 - DNA, 23 bp, synthetic construct
  misc_feature 1..23: note = Synthetic Polynucleotide
  source 1..23: mol_type = other DNA
tgcggyatttgtcctgctccggg

SEQ ID NO: 1984 - DNA, 23 bp, synthetic construct
  misc_feature 1..23: note = Synthetic Polynucleotide
  source 1..23: mol_type = other DNA
aagaaaayctacgccatgggtgg

SEQ ID NO: 1985 - DNA, 23 bp, synthetic construct
  misc_feature 1..23: note = Synthetic Polynucleotide
  source 1..23: mol_type = other DNA
gacagagytcctccacaacatgg

SEQ ID NO: 1986 - DNA, 23 bp, synthetic construct
  misc_feature 1..23: note = Synthetic Polynucleotide
  source 1..23: mol_type = other DNA
cagaggtyctttgacagctttgg

SEQ ID NO: 1987 - DNA, 23 bp, synthetic construct
  misc_feature 1..23: note = Synthetic Polynucleotide
  source 1..23: mol_type = other DNA
agcaagbacgtgggcctctgggg

SEQ ID NO: 1988 - DNA, 23 bp, synthetic construct
  misc_feature 1..23: note = Synthetic Polynucleotide
  source 1..23: mol_type = other DNA
ctgtgyaagtaatacaactttgg

SEQ ID NO: 1989 - DNA, 23 bp, synthetic construct
  misc_feature 1..23: note = Synthetic Polynucleotide
  source 1..23: mol_type = other DNA
ttcaytgtggtcattttcctggg

SEQ ID NO: 1990 - DNA, 23 bp, synthetic construct
  misc_feature 1..23: note = Synthetic Polynucleotide
  source 1..23: mol_type = other DNA
atatagaygcctctgctcccagg

SEQ ID NO: 1991 - DNA, 23 bp, synthetic construct
  misc_feature 1..23: note = Synthetic Polynucleotide
  source 1..23: mol_type = other DNA
acttyatttgactactttaatgg

SEQ ID NO: 1992 - DNA, 23 bp, synthetic construct
  misc_feature 1..23: note = Synthetic Polynucleotide
  source 1..23: mol_type = other DNA
tcaagtgygtccttccggagcgg

SEQ ID NO: 1993 - DNA, 23 bp, synthetic construct
  misc_feature 1..23: note = Synthetic Polynucleotide
  source 1..23: mol_type = other DNA
caagtgygtccttccggagcggg

SEQ ID NO: 1994 - DNA, 23 bp, synthetic construct
  misc_feature 1..23: note = Synthetic Polynucleotide
  source 1..23: mol_type = other DNA
aagtgygtccttccggagcgggg

SEQ ID NO: 1995 - DNA, 23 bp, synthetic construct
  misc_feature 1..23: note = Synthetic Polynucleotide
  source 1..23: mol_type = other DNA
tctyggagggcgaggaggagagg

SEQ ID NO: 1996 - DNA, 23 bp, synthetic construct
  misc_feature 1..23: note = Synthetic Polynucleotide
  source 1..23: mol_type = other DNA
ccctygggtgcaggtttgtgagg

SEQ ID NO: 1997 - DNA, 23 bp, synthetic construct
  misc_feature 1..23: note = Synthetic Polynucleotide
  source 1..23: mol_type = other DNA
gccgggygttggtctgtctctgg

SEQ ID NO: 1998 - DNA, 23 bp, synthetic construct
  misc_feature 1..23: note = Synthetic Polynucleotide
  source 1..23: mol_type = other DNA
tcagaagyttttttcttcgcagg

SEQ ID NO: 1999 - DNA, 23 bp, synthetic construct
  misc_feature 1..23: note = Synthetic Polynucleotide
  source 1..23: mol_type = other DNA
tccayggagttccctggcctggg

SEQ ID NO: 2000 - DNA, 23 bp, synthetic construct
  misc_feature 1..23: note = Synthetic Polynucleotide
  source 1..23: mol_type = other DNA
ccayggagttccctggcctgggg

SEQ ID NO: 2001 - DNA, 23 bp, synthetic construct
  misc_feature 1..23: note = Synthetic Polynucleotide
  source 1..23: mol_type = other DNA
cagtggygagactcgcccgcagg

SEQ ID NO: 2002 - DNA, 23 bp, synthetic construct
  misc_feature 1..23: note = Synthetic Polynucleotide
  source 1..23: mol_type = other DNA
agtggygagactcgcccgcaggg

SEQ ID NO: 2003 - DNA, 23 bp, synthetic construct
  misc_feature 1..23: note = Synthetic Polynucleotide
  source 1..23: mol_type = other DNA
cggtytgaagcgtgcagagatgg

SEQ ID NO: 2004 - DNA, 23 bp, synthetic construct
  misc_feature 1..23: note = Synthetic Polynucleotide
  source 1..23: mol_type = other DNA
ggataayatcaaacacgtcccgg

SEQ ID NO: 2005 - DNA, 23 bp, synthetic construct
  misc_feature 1..23: note = Synthetic Polynucleotide
  source 1..23: mol_type = other DNA
gataayatcaaacacgtcccggg

SEQ ID NO: 2006 - DNA, 23 bp, synthetic construct
  misc_feature 1..23: note = Synthetic Polynucleotide
  source 1..23: mol_type = other DNA
accytatgatccgcccgccttgg

SEQ ID NO: 2007 - DNA, 23 bp, synthetic construct
  misc_feature 1..23: note = Synthetic Polynucleotide
  source 1..23: mol_type = other DNA
ccaygtggaccctggtgagctgg

SEQ ID NO: 2008 - DNA, 23 bp, synthetic construct
  misc_feature 1..23: note = Synthetic Polynucleotide
  source 1..23: mol_type = other DNA
gccyggggaaaaacagagtcagg

SEQ ID NO: 2009 - DNA, 23 bp, synthetic construct
  misc_feature 1..23: note = Synthetic Polynucleotide
  source 1..23: mol_type = other DNA
aaggaaygtgttttacccggagg

SEQ ID NO: 2010 - DNA, 23 bp, synthetic construct
  misc_feature 1..23: note = Synthetic Polynucleotide
  source 1..23: mol_type = other DNA
ctgtgtgygccagggctgtgggg

SEQ ID NO: 2011 - DNA, 23 bp, synthetic construct
  misc_feature 1..23: note = Synthetic Polynucleotide
  source 1..23: mol_type = other DNA
tccayggtcaagtcagcctcagg

SEQ ID NO: 2012 - DNA, 23 bp, synthetic construct
  misc_feature 1..23: note = Synthetic Polynucleotide
  source 1..23: mol_type = other DNA
tgagayggcccacctgggcttgg

SEQ ID NO: 2013 - DNA, 23 bp, synthetic construct
  misc_feature 1..23: note = Synthetic Polynucleotide
  source 1..23: mol_type = other DNA
catgygagtgcaggcggagcagg

SEQ ID NO: 2014 - DNA, 23 bp, synthetic construct
  misc_feature 1..23: note = Synthetic Polynucleotide
  source 1..23: mol_type = other DNA
taaatgaytgagtttgcccttgg

SEQ ID NO: 2015 - DNA, 23 bp, synthetic construct
  misc_feature 1..23: note = Synthetic Polynucleotide
  source 1..23: mol_type = other DNA
ccaagygagtacagcgcacctgg

SEQ ID NO: 2016 - DNA, 23 bp, synthetic construct
  misc_feature 1..23: note = Synthetic Polynucleotide
  source 1..23: mol_type = other DNA
caagygagtacagcgcacctggg

SEQ ID NO: 2017 - DNA, 23 bp, synthetic construct
  misc_feature 1..23: note = Synthetic Polynucleotide
  source 1..23: mol_type = other DNA
aagygagtacagcgcacctgggg

SEQ ID NO: 2018 - DNA, 23 bp, synthetic construct
  misc_feature 1..23: note = Synthetic Polynucleotide
  source 1..23: mol_type = other DNA
ggaagyagtggtggaagtagagg

SEQ ID NO: 2019 - DNA, 23 bp, synthetic construct
  misc_feature 1..23: note = Synthetic Polynucleotide
  source 1..23: mol_type = other DNA
ctcayaggccattgcgaccacgg

SEQ ID NO: 2020 - DNA, 23 bp, synthetic construct
  misc_feature 1..23: note = Synthetic Polynucleotide
  source 1..23: mol_type = other DNA
cgaaatgyaagtctagttagagg

SEQ ID NO: 2021 - DNA, 23 bp, synthetic construct
  misc_feature 1..23: note = Synthetic Polynucleotide
  source 1..23: mol_type = other DNA
gaaatgyaagtctagttagaggg

SEQ ID NO: 2022 - DNA, 23 bp, synthetic construct
  misc_feature 1..23: note = Synthetic Polynucleotide
  source 1..23: mol_type = other DNA
gagaagaygacccaggtgagtgg

SEQ ID NO: 2023 - DNA, 23 bp, synthetic construct
  misc_feature 1..23: note = Synthetic Polynucleotide
  source 1..23: mol_type = other DNA
gcttttyttcaagctgcccaagg

SEQ ID NO: 2024 - DNA, 23 bp, synthetic construct
  misc_feature 1..23: note = Synthetic Polynucleotide
  source 1..23: mol_type = other DNA
acctgygggtgcgtggctgcagg

SEQ ID NO: 2025 - DNA, 23 bp, synthetic construct
  misc_feature 1..23: note = Synthetic Polynucleotide
  source 1..23: mol_type = other DNA
cctgygggtgcgtggctgcaggg

SEQ ID NO: 2026 - DNA, 23 bp, synthetic construct
  misc_feature 1..23: note = Synthetic Polynucleotide
  source 1..23: mol_type = other DNA
tgcyaaaagacccaaaacaaagg

SEQ ID NO: 2027 - DNA, 23 bp, synthetic construct
  misc_feature 1..23: note = Synthetic Polynucleotide
  source 1..23: mol_type = other DNA
aacaayggtggaacctgagaagg

SEQ ID NO: 2028 - DNA, 23 bp, synthetic construct
  misc_feature 1..23: note = Synthetic Polynucleotide
  source 1..23: mol_type = other DNA
aagtytgatgcagaccagaaagg

SEQ ID NO: 2029 - DNA, 23 bp, synthetic construct
  misc_feature 1..23: note = Synthetic Polynucleotide
  source 1..23: mol_type = other DNA
tggggaayatacgtgcttggcgg

SEQ ID NO: 2030 - DNA, 23 bp, synthetic construct
  misc_feature 1..23: note = Synthetic Polynucleotide
  source 1..23: mol_type = other DNA
ggggaayatacgtgcttggcggg

SEQ ID NO: 2031 - DNA, 23 bp, synthetic construct
  misc_feature 1..23: note = Synthetic Polynucleotide
  source 1..23: mol_type = other DNA
acttytatagtattgaataaagg

SEQ ID NO: 2032 - DNA, 23 bp, synthetic construct
  misc_feature 1..23: note = Synthetic Polynucleotide
  source 1..23: mol_type = other DNA
cttytatagtattgaataaaggg

SEQ ID NO: 2033 - DNA, 23 bp, synthetic construct
  misc_feature 1..23: note = Synthetic Polynucleotide
  source 1..23: mol_type = other DNA
acttttayagtattgaataaagg

SEQ ID NO: 2034 - DNA, 23 bp, synthetic construct
  misc_feature 1..23: note = Synthetic Polynucleotide
  source 1..23: mol_type = other DNA
cttttayagtattgaataaaggg

SEQ ID NO: 2035 - DNA, 23 bp, synthetic construct
  misc_feature 1..23: note = Synthetic Polynucleotide
  source 1..23: mol_type = other DNA
tgtggyggccatggcctatgagg

SEQ ID NO: 2036 - DNA, 23 bp, synthetic construct
  misc_feature 1..23: note = Synthetic Polynucleotide
  source 1..23: mol_type = other DNA
tgagtytgagagccggctggcgg

SEQ ID NO: 2037 - DNA, 23 bp, synthetic construct
  misc_feature 1..23: note = Synthetic Polynucleotide
  source 1..23: mol_type = other DNA
caagaytggggacttcgggctgg

SEQ ID NO: 2038 - DNA, 23 bp, synthetic construct
  misc_feature 1..23: note = Synthetic Polynucleotide
  source 1..23: mol_type = other DNA
tccaggygcgggcgtcatgctgg

SEQ ID NO: 2039 - DNA, 23 bp, synthetic construct
  misc_feature 1..23: note = Synthetic Polynucleotide
  source 1..23: mol_type = other DNA
cactggygtatacacaggtgagg

SEQ ID NO: 2040 - DNA, 23 bp, synthetic construct
  misc_feature 1..23: note = Synthetic Polynucleotide
  source 1..23: mol_type = other DNA
cgaggyattgccagcagtgcagg

SEQ ID NO: 2041 - DNA, 23 bp, synthetic construct
  misc_feature 1..23: note = Synthetic Polynucleotide
  source 1..23: mol_type = other DNA
tgcyggtggccgacgtgaagcgg

SEQ ID NO: 2042 - DNA, 23 bp, synthetic construct
  misc_feature 1..23: note = Synthetic Polynucleotide
  source 1..23: mol_type = other DNA
tgtgayggacagagcacaaatgg

SEQ ID NO: 2043 - DNA, 23 bp, synthetic construct
  misc_feature 1..23: note = Synthetic Polynucleotide
  source 1..23: mol_type = other DNA
aattygttttcttacaaaatcgg

SEQ ID NO: 2044 - DNA, 23 bp, synthetic construct
  misc_feature 1..23: note = Synthetic Polynucleotide
  source 1..23: mol_type = other DNA
gagaytggaaattttggccgtgg

SEQ ID NO: 2045 - DNA, 23 bp, synthetic construct
  misc_feature 1..23: note = Synthetic Polynucleotide
  source 1..23: mol_type = other DNA
ggtygggagggaaaagacattgg

SEQ ID NO: 2046 - DNA, 23 bp, synthetic construct
  misc_feature 1..23: note = Synthetic Polynucleotide
  source 1..23: mol_type = other DNA
caaaatayggaacttgattttgg

SEQ ID NO: 2047 - DNA, 23 bp, synthetic construct
  misc_feature 1..23: note = Synthetic Polynucleotide
  source 1..23: mol_type = other DNA
gcaaataygctatctgtagcagg

SEQ ID NO: 2048 - DNA, 23 bp, synthetic construct
  misc_feature 1..23: note = Synthetic Polynucleotide
  source 1..23: mol_type = other DNA
caagayggcggctcccagggagg

SEQ ID NO: 2049 - DNA, 23 bp, synthetic construct
  misc_feature 1..23: note = Synthetic Polynucleotide
  source 1..23: mol_type = other DNA
ccaggyatcccgggggtaggtgg

SEQ ID NO: 2050 - DNA, 23 bp, synthetic construct
  misc_feature 1..23: note = Synthetic Polynucleotide
  source 1..23: mol_type = other DNA
gatgaggyagatgcacacaaagg

SEQ ID NO: 2051 - DNA, 23 bp, synthetic construct
  misc_feature 1..23: note = Synthetic Polynucleotide
  source 1..23: mol_type = other DNA
ctggyaaaaaacctggtttttgg

SEQ ID NO: 2052 - DNA, 23 bp, synthetic construct
  misc_feature 1..23: note = Synthetic Polynucleotide
  source 1..23: mol_type = other DNA
tggyaaaaaacctggtttttggg

SEQ ID NO: 2053 - DNA, 23 bp, synthetic construct
  misc_feature 1..23: note = Synthetic Polynucleotide
  source 1..23: mol_type = other DNA
ggaggyaataactttgtaagtgg

SEQ ID NO: 2054 - DNA, 23 bp, synthetic construct
  misc_feature 1..23: note = Synthetic Polynucleotide
  source 1..23: mol_type = other DNA
aatgtyggcaccatcctgggagg

SEQ ID NO: 2055 - DNA, 23 bp, synthetic construct
  misc_feature 1..23: note = Synthetic Polynucleotide
  source 1..23: mol_type = other DNA
aatyttggaggcagaagctctgg

SEQ ID NO: 2056 - DNA, 23 bp, synthetic construct
  misc_feature 1..23: note = Synthetic Polynucleotide
  source 1..23: mol_type = other DNA
atggyaaggagcaagggagcagg

SEQ ID NO: 2057 - DNA, 23 bp, synthetic construct
  misc_feature 1..23: note = Synthetic Polynucleotide
  source 1..23: mol_type = other DNA
cactgygagtaagctggaagtgg

SEQ ID NO: 2058 - DNA, 23 bp, synthetic construct
  misc_feature 1..23: note = Synthetic Polynucleotide
  source 1..23: mol_type = other DNA
cggyatgggcggggccagggtgg

SEQ ID NO: 2059 - DNA, 23 bp, synthetic construct
  misc_feature 1..23: note = Synthetic Polynucleotide
  source 1..23: mol_type = other DNA
aagaayatgcccaaaacatctgg

SEQ ID NO: 2060 - DNA, 23 bp, synthetic construct
  misc_feature 1..23: note = Synthetic Polynucleotide
  source 1..23: mol_type = other DNA
tttgyggtggagaggggcttcgg

SEQ ID NO: 2061 - DNA, 23 bp, synthetic construct
  misc_feature 1..23: note = Synthetic Polynucleotide
  source 1..23: mol_type = other DNA
ttgyggtggagaggggcttcggg

SEQ ID NO: 2062 - DNA, 23 bp, synthetic construct
  misc_feature 1..23: note = Synthetic Polynucleotide
  source 1..23: mol_type = other DNA
gcttgyagatggccatggcgcgg

SEQ ID NO: 2063 - DNA, 23 bp, synthetic construct
  misc_feature 1..23: note = Synthetic Polynucleotide
  source 1..23: mol_type = other DNA
cccaygtacctgccgcgccctgg

SEQ ID NO: 2064 - DNA, 23 bp, synthetic construct
  misc_feature 1..23: note = Synthetic Polynucleotide
  source 1..23: mol_type = other DNA
agtaygtgaagctccagctgtgg

SEQ ID NO: 2065 - DNA, 23 bp, synthetic construct
  misc_feature 1..23: note = Synthetic Polynucleotide
  source 1..23: mol_type = other DNA
agcygggtgcccagtacccttgg

SEQ ID NO: 2066 - DNA, 23 bp, synthetic construct
  misc_feature 1..23: note = Synthetic Polynucleotide
  source 1..23: mol_type = other DNA
actytgatagagtaaataatagg

SEQ ID NO: 2067 - DNA, 23 bp, synthetic construct
  misc_feature 1..23: note = Synthetic Polynucleotide
  source 1..23: mol_type = other DNA
acttygatagagtaaataatagg

SEQ ID NO: 2068 - DNA, 23 bp, synthetic construct
  misc_feature 1..23: note = Synthetic Polynucleotide
  source 1..23: mol_type = other DNA
cactaytggggtctcggtcaagg

SEQ ID NO: 2069 - DNA, 23 bp, synthetic construct
  misc_feature 1..23: note = Synthetic Polynucleotide
  source 1..23: mol_type = other DNA
cttgygttatgatggattcatgg

SEQ ID NO: 2070 - DNA, 23 bp, synthetic construct
  misc_feature 1..23: note = Synthetic Polynucleotide
  source 1..23: mol_type = other DNA
ttcgtggyggaagctcctcacgg

SEQ ID NO: 2071 - DNA, 23 bp, synthetic construct
  misc_feature 1..23: note = Synthetic Polynucleotide
  source 1..23: mol_type = other DNA
gaayatataccaaggtatcccgg

SEQ ID NO: 2072 - DNA, 23 bp, synthetic construct
  misc_feature 1..23: note = Synthetic Polynucleotide
  source 1..23: mol_type = other DNA
accygtatctgtatggcaggtgg

SEQ ID NO: 2073 - DNA, 23 bp, synthetic construct
  misc_feature 1..23: note = Synthetic Polynucleotide
  source 1..23: mol_type = other DNA
tcayggtgagttaaggacagtgg

SEQ ID NO: 2074 - DNA, 23 bp, synthetic construct
  misc_feature 1..23: note = Synthetic Polynucleotide
  source 1..23: mol_type = other DNA
aacagayaatgtcagacaagagg

SEQ ID NO: 2075 - DNA, 23 bp, synthetic construct
  misc_feature 1..23: note = Synthetic Polynucleotide
  source 1..23: mol_type = other DNA
agcyaggtggcgacctgctccgg

SEQ ID NO: 2076 - DNA, 23 bp, synthetic construct
  misc_feature 1..23: note = Synthetic Polynucleotide
  source 1..23: mol_type = other DNA
cacagygggtccctgtctcctgg

SEQ ID NO: 2077 - DNA, 23 bp, synthetic construct
  misc_feature 1..23: note = Synthetic Polynucleotide
  source 1..23: mol_type = other DNA
acagygggtccctgtctcctggg

SEQ ID NO: 2078 - DNA, 23 bp, synthetic construct
  misc_feature 1..23: note = Synthetic Polynucleotide
  source 1..23: mol_type = other DNA
cgcaygatccacagcaccaatgg

SEQ ID NO: 2079 - DNA, 23 bp, synthetic construct
  misc_feature 1..23: note = Synthetic Polynucleotide
  source 1..23: mol_type = other DNA
gggattgytgttcatgaattggg

SEQ ID NO: 2080 - DNA, 23 bp, synthetic construct
  misc_feature 1..23: note = Synthetic Polynucleotide
  source 1..23: mol_type = other DNA
cacgagtytcttactgagaatgg

SEQ ID NO: 2081 - DNA, 23 bp, synthetic construct
  misc_feature 1..23: note = Synthetic Polynucleotide
  source 1..23: mol_type = other DNA
aggygagggctggggtgggcagg

SEQ ID NO: 2082 - DNA, 23 bp, synthetic construct
  misc_feature 1..23: note = Synthetic Polynucleotide
  source 1..23: mol_type = other DNA
atcatytggaacagtctacaagg

SEQ ID NO: 2083 - DNA, 23 bp, synthetic construct
  misc_feature 1..23: note = Synthetic Polynucleotide
  source 1..23: mol_type = other DNA
tcatytggaacagtctacaaggg

SEQ ID NO: 2084 - DNA, 23 bp, synthetic construct
  misc_feature 1..23: note = Synthetic Polynucleotide
  source 1..23: mol_type = other DNA
caagaggytggtgatctgcaagg

SEQ ID NO: 2085 - DNA, 23 bp, synthetic construct
  misc_feature 1..23: note = Synthetic Polynucleotide
  source 1..23: mol_type = other DNA
agaytggtgtgcgcaacatccgg

SEQ ID NO: 2086 - DNA, 23 bp, synthetic construct
  misc_feature 1..23: note = Synthetic Polynucleotide
  source 1..23: mol_type = other DNA
atcytagggtaaggtgacttagg

SEQ ID NO: 2087 - DNA, 23 bp, synthetic construct
  misc_feature 1..23: note = Synthetic Polynucleotide
  source 1..23: mol_type = other DNA
cctgtgygtcccccaggggcagg

SEQ ID NO: 2088 - DNA, 23 bp, synthetic construct
  misc_feature 1..23: note = Synthetic Polynucleotide
  source 1..23: mol_type = other DNA
ctgtgygtcccccaggggcaggg

SEQ ID NO: 2089 - DNA, 23 bp, synthetic construct
  misc_feature 1..23: note = Synthetic Polynucleotide
  source 1..23: mol_type = other DNA
agaytgtggatccgctggcccgg

SEQ ID NO: 2090 - DNA, 23 bp, synthetic construct
  misc_feature 1..23: note = Synthetic Polynucleotide
  source 1..23: mol_type = other DNA
aaaattygcaagtatgtcttagg

SEQ ID NO: 2091 - DNA, 23 bp, synthetic construct
  misc_feature 1..23: note = Synthetic Polynucleotide
  source 1..23: mol_type = other DNA
tggttcyaatggatgtctgctgg

SEQ ID NO: 2092 - DNA, 23 bp, synthetic construct
  misc_feature 1..23: note = Synthetic Polynucleotide
  source 1..23: mol_type = other DNA
ggttcyaatggatgtctgctggg

SEQ ID NO: 2093 - DNA, 23 bp, synthetic construct
  misc_feature 1..23: note = Synthetic Polynucleotide
  source 1..23: mol_type = other DNA
tggctgycagggacccagcaagg

SEQ ID NO: 2094 - DNA, 23 bp, synthetic construct
  misc_feature 1..23: note = Synthetic Polynucleotide
  source 1..23: mol_type = other DNA
ctgycagggacccagcaaggagg

SEQ ID NO: 2095 - DNA, 23 bp, synthetic construct
  misc_feature 1..23: note = Synthetic Polynucleotide
  source 1..23: mol_type = other DNA
cttaggyaagtaatgcaatatgg

SEQ ID NO: 2096 - DNA, 23 bp, synthetic construct
  misc_feature 1..23: note = Synthetic Polynucleotide
  source 1..23: mol_type = other DNA
agttccygacggctgaggagcgg

SEQ ID NO: 2097 - DNA, 23 bp, synthetic construct
  misc_feature 1..23: note = Synthetic Polynucleotide
  source 1..23: mol_type = other DNA
ccagyacggggaggtgtacgagg

SEQ ID NO: 2098 - DNA, 23 bp, synthetic construct
  misc_feature 1..23: note = Synthetic Polynucleotide
  source 1..23: mol_type = other DNA
cagyacggggaggtgtacgaggg

SEQ ID NO: 2099 - DNA, 23 bp, synthetic construct
  misc_feature 1..23: note = Synthetic Polynucleotide
  source 1..23: mol_type = other DNA
tcatattyacaggcttgtaaagg

SEQ ID NO: 2100 - DNA, 23 bp, synthetic construct
  misc_feature 1..23: note = Synthetic Polynucleotide
  source 1..23: mol_type = other DNA
agggcygtcggaccttcgagtgg

SEQ ID NO: 2101 - DNA, 23 bp, synthetic construct
  misc_feature 1..23: note = Synthetic Polynucleotide
  source 1..23: mol_type = other DNA
gggcygtcggaccttcgagtggg

SEQ ID NO: 2102 - DNA, 23 bp, synthetic construct
  misc_feature 1..23: note = Synthetic Polynucleotide
  source 1..23: mol_type = other DNA
ggcygtcggaccttcgagtgggg

SEQ ID NO: 2103 - DNA, 23 bp, synthetic construct
  misc_feature 1..23: note = Synthetic Polynucleotide
  source 1..23: mol_type = other DNA
attcccygatgaggcagatgcgg

SEQ ID NO: 2104 - DNA, 23 bp, synthetic construct
  misc_feature 1..23: note = Synthetic Polynucleotide
  source 1..23: mol_type = other DNA
ttcccygatgaggcagatgcggg

SEQ ID NO: 2105 - DNA, 23 bp, synthetic construct
  misc_feature 1..23: note = Synthetic Polynucleotide
  source 1..23: mol_type = other DNA
ataccyggcaagcaatagcgcgg

SEQ ID NO: 2106 - DNA, 23 bp, synthetic construct
  misc_feature 1..23: note = Synthetic Polynucleotide
  source 1..23: mol_type = other DNA
gtaaytgcaagatctacaaaagg

SEQ ID NO: 2107 - DNA, 23 bp, synthetic construct
  misc_feature 1..23: note = Synthetic Polynucleotide
  source 1..23: mol_type = other DNA
acatygacaaccatcggctatgg

SEQ ID NO: 2108 - DNA, 23 bp, synthetic construct
  misc_feature 1..23: note = Synthetic Polynucleotide
  source 1..23: mol_type = other DNA
cagttagygattggcaactttgg

SEQ ID NO: 2109 - DNA, 23 bp, synthetic construct
  misc_feature 1..23: note = Synthetic Polynucleotide
  source 1..23: mol_type = other DNA
tgtccaygatggcggcgcggcgg

SEQ ID NO: 2110 - DNA, 23 bp, synthetic construct
  misc_feature 1..23: note = Synthetic Polynucleotide
  source 1..23: mol_type = other DNA
ccaygatggcggcgcggcggcgg

SEQ ID NO: 2111 - DNA, 23 bp, synthetic construct
  misc_feature 1..23: note = Synthetic Polynucleotide
  source 1..23: mol_type = other DNA
gaccygctgccgtcagcgcctgg

SEQ ID NO: 2112 - DNA, 23 bp, synthetic construct
  misc_feature 1..23: note = Synthetic Polynucleotide
  source 1..23: mol_type = other DNA
gaaggygtggtagggaggcacgg

SEQ ID NO: 2113 - DNA, 23 bp, synthetic construct
  misc_feature 1..23: note = Synthetic Polynucleotide
  source 1..23: mol_type = other DNA
aaggygtggtagggaggcacggg

SEQ ID NO: 2114 - DNA, 23 bp, synthetic construct
  misc_feature 1..23: note = Synthetic Polynucleotide
  source 1..23: mol_type = other DNA
aggygtggtagggaggcacgggg

SEQ ID NO: 2115 - DNA, 23 bp, synthetic construct
  misc_feature 1..23: note = Synthetic Polynucleotide
  source 1..23: mol_type = other DNA
tcccacyggacaactgcctctgg

SEQ ID NO: 2116 - DNA, 23 bp, synthetic construct
  misc_feature 1..23: note = Synthetic Polynucleotide
  source 1..23: mol_type = other DNA
atcattgygagtgtattataagg

SEQ ID NO: 2117 - DNA, 23 bp, synthetic construct
  misc_feature 1..23: note = Synthetic Polynucleotide
  source 1..23: mol_type = other DNA
tcattgygagtgtattataaggg

SEQ ID NO: 2118 - DNA, 23 bp, synthetic construct
  misc_feature 1..23: note = Synthetic Polynucleotide
  source 1..23: mol_type = other DNA
cattgygagtgtattataagggg

SEQ ID NO: 2119 - DNA, 23 bp, synthetic construct
  misc_feature 1..23: note = Synthetic Polynucleotide
  source 1..23: mol_type = other DNA
gtagayaccttagagaacaatgg

SEQ ID NO: 2120 - DNA, 23 bp, synthetic construct
  misc_feature 1..23: note = Synthetic Polynucleotide
  source 1..23: mol_type = other DNA
ccagaytgtcagcaaacacctgg

SEQ ID NO: 2121 - DNA, 23 bp, synthetic construct
  misc_feature 1..23: note = Synthetic Polynucleotide
  source 1..23: mol_type = other DNA
tgccaytgctgtggacaacctgg

SEQ ID NO: 2122 - DNA, 23 bp, synthetic construct
  misc_feature 1..23: note = Synthetic Polynucleotide
  source 1..23: mol_type = other DNA
gtcgcygcccgtggcccctgcgg

SEQ ID NO: 2123 - DNA, 23 bp, synthetic construct
  misc_feature 1..23: note = Synthetic Polynucleotide
  source 1..23: mol_type = other DNA
gttataygtgccaatgtgactgg

SEQ ID NO: 2124 - DNA, 23 bp, synthetic construct
  misc_feature 1..23: note = Synthetic Polynucleotide
  source 1..23: mol_type = other DNA
attggyacgtgatccatcctagg

SEQ ID NO: 2125 - DNA, 23 bp, synthetic construct
  misc_feature 1..23: note = Synthetic Polynucleotide
  source 1..23: mol_type = other DNA
gacggcyctgtaggctttggagg

SEQ ID NO: 2126 - DNA, 23 bp, synthetic construct
  misc_feature 1..23: note = Synthetic Polynucleotide
  source 1..23: mol_type = other DNA
cgtaataygggaaaaaggcgtgg

SEQ ID NO: 2127 - DNA, 23 bp, synthetic construct
  misc_feature 1..23: note = Synthetic Polynucleotide
  source 1..23: mol_type = other DNA
aataygggaaaaaggcgtggtgg

SEQ ID NO: 2128 - DNA, 23 bp, synthetic construct
  misc_feature 1..23: note = Synthetic Polynucleotide
  source 1..23: mol_type = other DNA
ataygggaaaaaggcgtggtggg

SEQ ID NO: 2129 - DNA, 23 bp, synthetic construct
  misc_feature 1..23: note = Synthetic Polynucleotide
  source 1..23: mol_type = other DNA
cggccaygcagtcctgtgccagg

SEQ ID NO: 2130 - DNA, 23 bp, synthetic construct
  misc_feature 1..23: note = Synthetic Polynucleotide
  source 1..23: mol_type = other DNA
ggccaygcagtcctgtgccaggg

SEQ ID NO: 2131 - DNA, 23 bp, synthetic construct
  misc_feature 1..23: note = Synthetic Polynucleotide
  source 1..23: mol_type = other DNA
ctgcyggtctaccagggcaaagg

SEQ ID NO: 2132 - DNA, 23 bp, synthetic construct
  misc_feature 1..23: note = Synthetic Polynucleotide
  source 1..23: mol_type = other DNA
cctaaaaygttggatgctgaagg

SEQ ID NO: 2133 - DNA, 23 bp, synthetic construct
  misc_feature 1..23: note = Synthetic Polynucleotide
  source 1..23: mol_type = other DNA
tgatytcttgggagaagaactgg

SEQ ID NO: 2134 - DNA, 23 bp, synthetic construct
  misc_feature 1..23: note = Synthetic Polynucleotide
  source 1..23: mol_type = other DNA
gcccygcacgcaaatgtgagtgg

SEQ ID NO: 2135 - DNA, 23 bp, synthetic construct
  misc_feature 1..23: note = Synthetic Polynucleotide
  source 1..23: mol_type = other DNA
cccygcacgcaaatgtgagtggg

SEQ ID NO: 2136 - DNA, 23 bp, synthetic construct
  misc_feature 1..23: note = Synthetic Polynucleotide
  source 1..23: mol_type = other DNA
acaagatygtctacagaaacagg

SEQ ID NO: 2137 - DNA, 23 bp, synthetic construct
  misc_feature 1..23: note = Synthetic Polynucleotide
  source 1..23: mol_type = other DNA
ttgtgcyaggaagttatgacagg

SEQ ID NO: 2138 - DNA, 23 bp, synthetic construct
  misc_feature 1..23: note = Synthetic Polynucleotide
  source 1..23: mol_type = other DNA
gcgttyacgtgtcccccctttgg

SEQ ID NO: 2139 - DNA, 23 bp, synthetic construct
  misc_feature 1..23: note = Synthetic Polynucleotide
  source 1..23: mol_type = other DNA
cgttyacgtgtcccccctttggg

SEQ ID NO: 2140 - DNA, 23 bp, synthetic construct
  misc_feature 1..23: note = Synthetic Polynucleotide
  source 1..23: mol_type = other DNA
acgctytcaaggtggctgcccgg

SEQ ID NO: 2141 - DNA, 23 bp, synthetic construct
  misc_feature 1..23: note = Synthetic Polynucleotide
  source 1..23: mol_type = other DNA
cgctytcaaggtggctgcccggg

SEQ ID NO: 2142 - DNA, 23 bp, synthetic construct
  misc_feature 1..23: note = Synthetic Polynucleotide
  source 1..23: mol_type = other DNA
acttycccttattccatccacgg

SEQ ID NO: 2143 - DNA, 23 bp, synthetic construct
  misc_feature 1..23: note = Synthetic Polynucleotide
  source 1..23: mol_type = other DNA
cttycccttattccatccacggg

SEQ ID NO: 2144 - DNA, 23 bp, synthetic construct
  misc_feature 1..23: note = Synthetic Polynucleotide
  source 1..23: mol_type = other DNA
catgyttctgctgatcgtgctgg

SEQ ID NO: 2145 - DNA, 23 bp, synthetic construct
  misc_feature 1..23: note = Synthetic Polynucleotide
  source 1..23: mol_type = other DNA
atgyttctgctgatcgtgctggg

SEQ ID NO: 2146 - DNA, 23 bp, synthetic construct
  misc_feature 1..23: note = Synthetic Polynucleotide
  source 1..23: mol_type = other DNA
aggccyggagccctgtttttagg

SEQ ID NO: 2147 - DNA, 23 bp, synthetic construct
  misc_feature 1..23: note = Synthetic Polynucleotide
  source 1..23: mol_type = other DNA
gcagcycttcttagggggtgtgg

SEQ ID NO: 2148 - DNA, 23 bp, synthetic construct
  misc_feature 1..23: note = Synthetic Polynucleotide
  source 1..23: mol_type = other DNA
accatccyggagggccgcctggg

SEQ ID NO: 2149 - DNA, 23 bp, synthetic construct
  misc_feature 1..23: note = Synthetic Polynucleotide
  source 1..23: mol_type = other DNA
aagygattgcagcagtgaaatgg

SEQ ID NO: 2150 - DNA, 23 bp, synthetic construct
  misc_feature 1..23: note = Synthetic Polynucleotide
  source 1..23: mol_type = other DNA
ctacycaactgctggagggaagg

SEQ ID NO: 2151 - DNA, 23 bp, synthetic construct
  misc_feature 1..23: note = Synthetic Polynucleotide
  source 1..23: mol_type = other DNA
tgtaatayttctgatcatgttgg

SEQ ID NO: 2152 - DNA, 23 bp, synthetic construct
  misc_feature 1..23: note = Synthetic Polynucleotide
  source 1..23: mol_type = other DNA
gcctccyggcgctacggaagtgg

SEQ ID NO: 2153 - DNA, 23 bp, synthetic construct
  misc_feature 1..23: note = Synthetic Polynucleotide
  source 1..23: mol_type = other DNA
cctccyggcgctacggaagtggg

SEQ ID NO: 2154 - DNA, 23 bp, synthetic construct
  misc_feature 1..23: note = Synthetic Polynucleotide
  source 1..23: mol_type = other DNA
ctccyggcgctacggaagtgggg

SEQ ID NO: 2155 - DNA, 23 bp, synthetic construct
  misc_feature 1..23: note = Synthetic Polynucleotide
  source 1..23: mol_type = other DNA
tagagytctgcttgaaacatagg

SEQ ID NO: 2156 - DNA, 23 bp, synthetic construct
  misc_feature 1..23: note = Synthetic Polynucleotide
  source 1..23: mol_type = other DNA
catcgcgyccaacaaccgtaagg

SEQ ID NO: 2157 - DNA, 23 bp, synthetic construct
  misc_feature 1..23: note = Synthetic Polynucleotide
  source 1..23: mol_type = other DNA
atcgcgyccaacaaccgtaaggg

SEQ ID NO: 2158 - DNA, 23 bp, synthetic construct
  misc_feature 1..23: note = Synthetic Polynucleotide
  source 1..23: mol_type = other DNA
agctctycctcatcatggcctgg

SEQ ID NO: 2159 - DNA, 23 bp, synthetic construct
  misc_feature 1..23: note = Synthetic Polynucleotide
  source 1..23: mol_type = other DNA
tgtgtgcyggcccatcactttgg

SEQ ID NO: 2160 - DNA, 23 bp, synthetic construct
  misc_feature 1..23: note = Synthetic Polynucleotide
  source 1..23: mol_type = other DNA
agaagaygctgtttaatctgagg

SEQ ID NO: 2161 - DNA, 23 bp, synthetic construct
  misc_feature 1..23: note = Synthetic Polynucleotide
  source 1..23: mol_type = other DNA
cttcyatgatcttcgaggagagg

SEQ ID NO: 2162 - DNA, 23 bp, synthetic construct
  misc_feature 1..23: note = Synthetic Polynucleotide
  source 1..23: mol_type = other DNA
ttcyatgatcttcgaggagaggg

SEQ ID NO: 2163 - DNA, 23 bp, synthetic construct
  misc_feature 1..23: note = Synthetic Polynucleotide
  source 1..23: mol_type = other DNA
tccycggtggctcaccacattgg

SEQ ID NO: 2164 - DNA, 23 bp, synthetic construct
  misc_feature 1..23: note = Synthetic Polynucleotide
  source 1..23: mol_type = other DNA
ttccyggtcatgcactacagagg

SEQ ID NO: 2165 - DNA, 23 bp, synthetic construct
  misc_feature 1..23: note = Synthetic Polynucleotide
  source 1..23: mol_type = other DNA
aatayggcggccgaggcggacgg

SEQ ID NO: 2166 - DNA, 23 bp, synthetic construct
  misc_feature 1..23: note = Synthetic Polynucleotide
  source 1..23: mol_type = other DNA
tagcaayggatcgtgggcaatgg

SEQ ID NO: 2167 - DNA, 23 bp, synthetic construct
  misc_feature 1..23: note = Synthetic Polynucleotide
  source 1..23: mol_type = other DNA
acctyaactctgggacctgctgg

SEQ ID NO: 2168 - DNA, 23 bp, synthetic construct
  misc_feature 1..23: note = Synthetic Polynucleotide
  source 1..23: mol_type = other DNA
gccctgcygtacccgctgcccgg

SEQ ID NO: 2169 - DNA, 23 bp, synthetic construct
  misc_feature 1..23: note = Synthetic Polynucleotide
  source 1..23: mol_type = other DNA
tgcygtacccgctgcccggctgg

SEQ ID NO: 2170 - DNA, 23 bp, synthetic construct
  misc_feature 1..23: note = Synthetic Polynucleotide
  source 1..23: mol_type = other DNA
ctccagyaagttataaaatttgg

SEQ ID NO: 2171 - DNA, 23 bp, synthetic construct
  misc_feature 1..23: note = Synthetic Polynucleotide
  source 1..23: mol_type = other DNA
tccagyaagttataaaatttggg

SEQ ID NO: 2172 - DNA, 23 bp, synthetic construct
  misc_feature 1..23: note = Synthetic Polynucleotide
  source 1..23: mol_type = other DNA
atgycatcagcgtggtgttccgg

SEQ ID NO: 2173 - DNA, 23 bp, synthetic construct
  misc_feature 1..23: note = Synthetic Polynucleotide
  source 1..23: mol_type = other DNA
cagctacygggatgcccccctgg

SEQ ID NO: 2174 - DNA, 23 bp, synthetic construct
  misc_feature 1..23: note = Synthetic Polynucleotide
  source 1..23: mol_type = other DNA
agctacygggatgcccccctggg

SEQ ID NO: 2175 - DNA, 23 bp, synthetic construct
  misc_feature 1..23: note = Synthetic Polynucleotide
  source 1..23: mol_type = other DNA
ttcyggtttgtcttatattctgg

SEQ ID NO: 2176 - DNA, 23 bp, synthetic construct
  misc_feature 1..23: note = Synthetic Polynucleotide
  source 1..23: mol_type = other DNA
tgagcyggtgggcccaatgcagg

SEQ ID NO: 2177 - DNA, 23 bp, synthetic construct
  misc_feature 1..23: note = Synthetic Polynucleotide
  source 1..23: mol_type = other DNA
ttacttcyctttggctatgaagg

SEQ ID NO: 2178 - DNA, 23 bp, synthetic construct
  misc_feature 1..23: note = Synthetic Polynucleotide
  source 1..23: mol_type = other DNA
aagygtgtgcctgtgtgccgagg

SEQ ID NO: 2179 - DNA, 23 bp, synthetic construct
  misc_feature 1..23: note = Synthetic Polynucleotide
  source 1..23: mol_type = other DNA
acaaggygagcgtgggctgctgg

SEQ ID NO: 2180 - DNA, 23 bp, synthetic construct
  misc_feature 1..23: note = Synthetic Polynucleotide
  source 1..23: mol_type = other DNA
caaggygagcgtgggctgctggg

SEQ ID NO: 2181 - DNA, 23 bp, synthetic construct
  misc_feature 1..23: note = Synthetic Polynucleotide
  source 1..23: mol_type = other DNA
tgcygtaccaagtgccacaaagg

SEQ ID NO: 2182 - DNA, 23 bp, synthetic construct
  misc_feature 1..23: note = Synthetic Polynucleotide
  source 1..23: mol_type = other DNA
gacaytgatgaatgtcgctatgg

SEQ ID NO: 2183 - DNA, 23 bp, synthetic construct
  misc_feature 1..23: note = Synthetic Polynucleotide
  source 1..23: mol_type = other DNA
ctcaayagatgccatctccctgg

SEQ ID NO: 2184 - DNA, 23 bp, synthetic construct
  misc_feature 1..23: note = Synthetic Polynucleotide
  source 1..23: mol_type = other DNA
ctccayactgagctgtgccacgg

SEQ ID NO: 2185 - DNA, 23 bp, synthetic construct
  misc_feature 1..23: note = Synthetic Polynucleotide
  source 1..23: mol_type = other DNA
ggggygcttcaaggccattgtgg

SEQ ID NO: 2186 - DNA, 23 bp, synthetic construct
  misc_feature 1..23: note = Synthetic Polynucleotide
  source 1..23: mol_type = other DNA
aagctccyggacttttttctggg

SEQ ID NO: 2187 - DNA, 23 bp, synthetic construct
  misc_feature 1..23: note = Synthetic Polynucleotide
  source 1..23: mol_type = other DNA
aaayccaccccttacgagtgcgg

SEQ ID NO: 2188 - DNA, 23 bp, synthetic construct
  misc_feature 1..23: note = Synthetic Polynucleotide
  source 1..23: mol_type = other DNA
ttccggygagtgggccacactgg

SEQ ID NO: 2189 - DNA, 23 bp, synthetic construct
  misc_feature 1..23: note = Synthetic Polynucleotide
  source 1..23: mol_type = other DNA
cacctyctttgcccatcagcagg

SEQ ID NO: 2190 - DNA, 23 bp, synthetic construct
  misc_feature 1..23: note = Synthetic Polynucleotide
  source 1..23: mol_type = other DNA
tcaccgcytcaatgacacagagg

SEQ ID NO: 2191 - DNA, 23 bp, synthetic construct
  misc_feature 1..23: note = Synthetic Polynucleotide
  source 1..23: mol_type = other DNA
agctayggccgcagtgattctgg

SEQ ID NO: 2192 - DNA, 23 bp, synthetic construct
  misc_feature 1..23: note = Synthetic Polynucleotide
  source 1..23: mol_type = other DNA
ctayccgccatcccatacattgg

SEQ ID NO: 2193 - DNA, 23 bp, synthetic construct
  misc_feature 1..23: note = Synthetic Polynucleotide
  source 1..23: mol_type = other DNA
ttcacccyggtccctgtctgggg

SEQ ID NO: 2194 - DNA, 23 bp, synthetic construct
  misc_feature 1..23: note = Synthetic Polynucleotide
  source 1..23: mol_type = other DNA
agcygtgggacaagagcagccgg

SEQ ID NO: 2195 - DNA, 23 bp, synthetic construct
  misc_feature 1..23: note = Synthetic Polynucleotide
  source 1..23: mol_type = other DNA
caagaaaygtgctgctgatctgg

SEQ ID NO: 2196 - DNA, 23 bp, synthetic construct
  misc_feature 1..23: note = Synthetic Polynucleotide
  source 1..23: mol_type = other DNA
aagaaaygtgctgctgatctggg

SEQ ID NO: 2197 - DNA, 23 bp, synthetic construct
  misc_feature 1..23: note = Synthetic Polynucleotide
  source 1..23: mol_type = other DNA
gaggccayggagctgctgcaggg

SEQ ID NO: 2198 - DNA, 23 bp, synthetic construct
  misc_feature 1..23: note = Synthetic Polynucleotide
  source 1..23: mol_type = other DNA
cactggayatggaaatagagagg

SEQ ID NO: 2199 - DNA, 23 bp, synthetic construct
  misc_feature 1..23: note = Synthetic Polynucleotide
  source 1..23: mol_type = other DNA
ctcactcyaaaaaactttaccgg

SEQ ID NO: 2200 - DNA, 23 bp, synthetic construct
  misc_feature 1..23: note = Synthetic Polynucleotide
  source 1..23: mol_type = other DNA
ggtccyggatgtggtgaggaagg

SEQ ID NO: 2201 - DNA, 23 bp, synthetic construct
  misc_feature 1..23: note = Synthetic Polynucleotide
  source 1..23: mol_type = other DNA
cggcytcaaccccacagcaatgg

SEQ ID NO: 2202 - DNA, 23 bp, synthetic construct
  misc_feature 1..23: note = Synthetic Polynucleotide
  source 1..23: mol_type = other DNA
ggcytcaaccccacagcaatggg

SEQ ID NO: 2203 - DNA, 23 bp, synthetic construct
  misc_feature 1..23: note = Synthetic Polynucleotide
  source 1..23: mol_type = other DNA
actgataycaggtgagagccagg

SEQ ID NO: 2204 - DNA, 23 bp, synthetic construct
  misc_feature 1..23: note = Synthetic Polynucleotide
  source 1..23: mol_type = other DNA
ctgataycaggtgagagccaggg

SEQ ID NO: 2205 - DNA, 23 bp, synthetic construct
  misc_feature 1..23: note = Synthetic Polynucleotide
  source 1..23: mol_type = other DNA
acagttayaggttctggtcctgg

SEQ ID NO: 2206 - DNA, 23 bp, synthetic construct
  misc_feature 1..23: note = Synthetic Polynucleotide
  source 1..23: mol_type = other DNA
gttayaggttctggtcctggagg

SEQ ID NO: 2207 - DNA, 23 bp, synthetic construct
  misc_feature 1..23: note = Synthetic Polynucleotide
  source 1..23: mol_type = other DNA
ctgtgagygtgcccaggggcggg

SEQ ID NO: 2208 - DNA, 23 bp, synthetic construct
  misc_feature 1..23: note = Synthetic Polynucleotide
  source 1..23: mol_type = other DNA
tgagygtgcccaggggcgggcgg

SEQ ID NO: 2209 - DNA, 23 bp, synthetic construct
  misc_feature 1..23: note = Synthetic Polynucleotide
  source 1..23: mol_type = other DNA
gccatccygggtatggggtgggg

SEQ ID NO: 2210 - DNA, 23 bp, synthetic construct
  misc_feature 1..23: note = Synthetic Polynucleotide
  source 1..23: mol_type = other DNA
ccatccygggtatggggtggggg

SEQ ID NO: 2211 - DNA, 23 bp, synthetic construct
  misc_feature 1..23: note = Synthetic Polynucleotide
  source 1..23: mol_type = other DNA
catccygggtatggggtgggggg

SEQ ID NO: 2212 - DNA, 23 bp, synthetic construct
  misc_feature 1..23: note = Synthetic Polynucleotide
  source 1..23: mol_type = other DNA
ggtctytgacgtcttcctggtgg

SEQ ID NO: 2213 - DNA, 23 bp, synthetic construct
  misc_feature 1..23: note = Synthetic Polynucleotide
  source 1..23: mol_type = other DNA
cgcyggccaccagcactgccagg

SEQ ID NO: 2214 - DNA, 23 bp, synthetic construct
  misc_feature 1..23: note = Synthetic Polynucleotide
  source 1..23: mol_type = other DNA
gagygccgcctggaggtgcgagg

SEQ ID NO: 2215 - DNA, 23 bp, synthetic construct
  misc_feature 1..23: note = Synthetic Polynucleotide
  source 1..23: mol_type = other DNA
aatccygtactatgtctacatgg

SEQ ID NO: 2216 - DNA, 23 bp, synthetic construct
  misc_feature 1..23: note = Synthetic Polynucleotide
  source 1..23: mol_type = other DNA
atccygtactatgtctacatggg

SEQ ID NO: 2217 - DNA, 23 bp, synthetic construct
  misc_feature 1..23: note = Synthetic Polynucleotide
  source 1..23: mol_type = other DNA
tccygtactatgtctacatgggg

SEQ ID NO: 2218 - DNA, 23 bp, synthetic construct
  misc_feature 1..23: note = Synthetic Polynucleotide
  source 1..23: mol_type = other DNA
acattygggcttttggtaagtgg

SEQ ID NO: 2219 - DNA, 23 bp, synthetic construct
  misc_feature 1..23: note = Synthetic Polynucleotide
  source 1..23: mol_type = other DNA
ataytttctggtccattgaaagg

SEQ ID NO: 2220 - DNA, 23 bp, synthetic construct
  misc_feature 1..23: note = Synthetic Polynucleotide
  source 1..23: mol_type = other DNA
catctytgactgtgtctacacgg

SEQ ID NO: 2221 - DNA, 23 bp, synthetic construct
  misc_feature 1..23: note = Synthetic Polynucleotide
  source 1..23: mol_type = other DNA
aggtgcygttctggggcctacgg

SEQ ID NO: 2222 - DNA, 23 bp, synthetic construct
  misc_feature 1..23: note = Synthetic Polynucleotide
  source 1..23: mol_type = other DNA
ggtgcygttctggggcctacggg

SEQ ID NO: 2223 - DNA, 23 bp, synthetic construct
  misc_feature 1..23: note = Synthetic Polynucleotide
  source 1..23: mol_type = other DNA
ggacaaygtagaaatactcctgg

SEQ ID NO: 2224 - DNA, 23 bp, synthetic construct
  misc_feature 1..23: note = Synthetic Polynucleotide
  source 1..23: mol_type = other DNA
gagaggygagaagagggaagcgg

SEQ ID NO: 2225 - DNA, 23 bp, synthetic construct
  misc_feature 1..23: note = Synthetic Polynucleotide
  source 1..23: mol_type = other DNA
aaaggygggcctgggacctgagg

SEQ ID NO: 2226 - DNA, 23 bp, synthetic construct
  misc_feature 1..23: note = Synthetic Polynucleotide
  source 1..23: mol_type = other DNA
gcacgygagtggccatcctcagg

SEQ ID NO: 2227 - DNA, 23 bp, synthetic construct
  misc_feature 1..23: note = Synthetic Polynucleotide
  source 1..23: mol_type = other DNA
cacgygagtggccatcctcaggg

SEQ ID NO: 2228 - DNA, 23 bp, synthetic construct
  misc_feature 1..23: note = Synthetic Polynucleotide
  source 1..23: mol_type = other DNA
ggagayggcctccatgaaggagg

SEQ ID NO: 2229 - DNA, 23 bp, synthetic construct
  misc_feature 1..23: note = Synthetic Polynucleotide
  source 1..23: mol_type = other DNA
cttaytacagttaccagaacagg

SEQ ID NO: 2230 - DNA, 23 bp, synthetic construct
  misc_feature 1..23: note = Synthetic Polynucleotide
  source 1..23: mol_type = other DNA
agcttcayggcgcccgcgccggg

SEQ ID NO: 2231 - DNA, 23 bp, synthetic construct
  misc_feature 1..23: note = Synthetic Polynucleotide
  source 1..23: mol_type = other DNA
tcayggcgcccgcgccgggccgg

SEQ ID NO: 2232 - DNA, 23 bp, synthetic construct
  misc_feature 1..23: note = Synthetic Polynucleotide
  source 1..23: mol_type = other DNA
ggctgatyacctcacgctccagg

SEQ ID NO: 2233 - DNA, 23 bp, synthetic construct
  misc_feature 1..23: note = Synthetic Polynucleotide
  source 1..23: mol_type = other DNA
gatyacctcacgctccaggttgg

SEQ ID NO: 2234 - DNA, 23 bp, synthetic construct
  misc_feature 1..23: note = Synthetic Polynucleotide
  source 1..23: mol_type = other DNA
atctctcytggggctccctgggg

SEQ ID NO: 2235 - DNA, 23 bp, synthetic construct
  misc_feature 1..23: note = Synthetic Polynucleotide
  source 1..23: mol_type = other DNA
tctcytggggctccctggggtgg

SEQ ID NO: 2236 - DNA, 23 bp, synthetic construct
  misc_feature 1..23: note = Synthetic Polynucleotide
  source 1..23: mol_type = other DNA
gagcyggggactggacaatttgg

SEQ ID NO: 2237 - DNA, 23 bp, synthetic construct
  misc_feature 1..23: note = Synthetic Polynucleotide
  source 1..23: mol_type = other DNA
agcyggggactggacaatttggg

SEQ ID NO: 2238 - DNA, 23 bp, synthetic construct
  misc_feature 1..23: note = Synthetic Polynucleotide
  source 1..23: mol_type = other DNA
tcggccygtccaggtgagtgtgg

SEQ ID NO: 2239 - DNA, 23 bp, synthetic construct
  misc_feature 1..23: note = Synthetic Polynucleotide
  source 1..23: mol_type = other DNA
cttcayctgcaaggaggacctgg

SEQ ID NO: 2240 - DNA, 23 bp, synthetic construct
  misc_feature 1..23: note = Synthetic Polynucleotide
  source 1..23: mol_type = other DNA
aagcygctaattggtaggtgagg

SEQ ID NO: 2241 - DNA, 23 bp, synthetic construct
  misc_feature 1..23: note = Synthetic Polynucleotide
  source 1..23: mol_type = other DNA
atcaytggggtggatcccgaagg

SEQ ID NO: 2242 - DNA, 23 bp, synthetic construct
  misc_feature 1..23: note = Synthetic Polynucleotide
  source 1..23: mol_type = other DNA
tcaytggggtggatcccgaaggg

SEQ ID NO: 2243 - DNA, 23 bp, synthetic construct
  misc_feature 1..23: note = Synthetic Polynucleotide
  source 1..23: mol_type = other DNA
caagcagygtgagctgctcctgg

SEQ ID NO: 2244 - DNA, 23 bp, synthetic construct
  misc_feature 1..23: note = Synthetic Polynucleotide
  source 1..23: mol_type = other DNA
gcagygtgagctgctcctggagg

SEQ ID NO: 2245 - DNA, 23 bp, synthetic construct
  misc_feature 1..23: note = Synthetic Polynucleotide
  source 1..23: mol_type = other DNA
ggcyatatacaactacgcaaagg

SEQ ID NO: 2246 - DNA, 23 bp, synthetic construct
  misc_feature 1..23: note = Synthetic Polynucleotide
  source 1..23: mol_type = other DNA
tcgagaycttcgatgtgagttgg

SEQ ID NO: 2247 - DNA, 23 bp, synthetic construct
  misc_feature 1..23: note = Synthetic Polynucleotide
  source 1..23: mol_type = other DNA
cgagaycttcgatgtgagttggg

SEQ ID NO: 2248 - DNA, 23 bp, synthetic construct
  misc_feature 1..23: note = Synthetic Polynucleotide
  source 1..23: mol_type = other DNA
aagatcaytggtaactcagtagg

SEQ ID NO: 2249 - DNA, 23 bp, synthetic construct
  misc_feature 1..23: note = Synthetic Polynucleotide
  source 1..23: mol_type = other DNA
agatcaytggtaactcagtaggg

SEQ ID NO: 2250 - DNA, 23 bp, synthetic construct
  misc_feature 1..23: note = Synthetic Polynucleotide
  source 1..23: mol_type = other DNA
gatcaytggtaactcagtagggg

SEQ ID NO: 2251 - DNA, 23 bp, synthetic construct
  misc_feature 1..23: note = Synthetic Polynucleotide
  source 1..23: mol_type = other DNA
gggcyggcccccatgtgggaagg

SEQ ID NO: 2252 - DNA, 23 bp, synthetic construct
  misc_feature 1..23: note = Synthetic Polynucleotide
  source 1..23: mol_type = other DNA
gcccytcctgctgttcatcatgg

SEQ ID NO: 2253 - DNA, 23 bp, synthetic construct
  misc_feature 1..23: note = Synthetic Polynucleotide
  source 1..23: mol_type = other DNA
gatgcyggtgttcgacaacctgg

SEQ ID NO: 2254 - DNA, 23 bp, synthetic construct
  misc_feature 1..23: note = Synthetic Polynucleotide
  source 1..23: mol_type = other DNA
aggagygctatttagcatcgagg

SEQ ID NO: 2255 - DNA, 23 bp, synthetic construct
  misc_feature 1..23: note = Synthetic Polynucleotide
  source 1..23: mol_type = other DNA
aggycagctaaataagctatcgg

SEQ ID NO: 2256 - DNA, 23 bp, synthetic construct
  misc_feature 1..23: note = Synthetic Polynucleotide
  source 1..23: mol_type = other DNA
agaacaygctggggcttttgcgg

SEQ ID NO: 2257 - DNA, 23 bp, synthetic construct
  misc_feature 1..23: note = Synthetic Polynucleotide
  source 1..23: mol_type = other DNA
attcytggggagcttagcgatgg

SEQ ID NO: 2258 - DNA, 23 bp, synthetic construct
  misc_feature 1..23: note = Synthetic Polynucleotide
  source 1..23: mol_type = other DNA
tctggcycctttctctacacagg

SEQ ID NO: 2259 - DNA, 23 bp, synthetic construct
  misc_feature 1..23: note = Synthetic Polynucleotide
  source 1..23: mol_type = other DNA
ggcycctttctctacacaggagg

SEQ ID NO: 2260 - DNA, 23 bp, synthetic construct
  misc_feature 1..23: note = Synthetic Polynucleotide
  source 1..23: mol_type = other DNA
tcgcatcytccggatctttgagg

SEQ ID NO: 2261 - DNA, 23 bp, synthetic construct
  misc_feature 1..23: note = Synthetic Polynucleotide
  source 1..23: mol_type = other DNA
cgcatcytccggatctttgaggg

SEQ ID NO: 2262 - DNA, 23 bp, synthetic construct
  misc_feature 1..23: note = Synthetic Polynucleotide
  source 1..23: mol_type = other DNA
gcatcytccggatctttgagggg

SEQ ID NO: 2263 - DNA, 23 bp, synthetic construct
  misc_feature 1..23: note = Synthetic Polynucleotide
  source 1..23: mol_type = other DNA
ctaygggcagagtgggctattgg

SEQ ID NO: 2264 - DNA, 23 bp, synthetic construct
  misc_feature 1..23: note = Synthetic Polynucleotide
  source 1..23: mol_type = other DNA
ggacyggctgtcacgggctcagg

SEQ ID NO: 2265 - DNA, 23 bp, synthetic construct
  misc_feature 1..23: note = Synthetic Polynucleotide
  source 1..23: mol_type = other DNA
gtgaytgcagagagaggacttgg

SEQ ID NO: 2266 - DNA, 23 bp, synthetic construct
  misc_feature 1..23: note = Synthetic Polynucleotide
  source 1..23: mol_type = other DNA
gcttcgcygcatcgctgaaaggg

SEQ ID NO: 2267 - DNA, 23 bp, synthetic construct
  misc_feature 1..23: note = Synthetic Polynucleotide
  source 1..23: mol_type = other DNA
atgtatyaattacagacacttgg

SEQ ID NO: 2268 - DNA, 23 bp, synthetic construct
  misc_feature 1..23: note = Synthetic Polynucleotide
  source 1..23: mol_type = other DNA
atcatggyaagcaagaaacaagg

SEQ ID NO: 2269 - DNA, 23 bp, synthetic construct
  misc_feature 1..23: note = Synthetic Polynucleotide
  source 1..23: mol_type = other DNA
gggcyagaaatctgttgctatgg

SEQ ID NO: 2270 - DNA, 23 bp, synthetic construct
  misc_feature 1..23: note = Synthetic Polynucleotide
  source 1..23: mol_type = other DNA
ggcyagaaatctgttgctatggg

SEQ ID NO: 2271 - DNA, 23 bp, synthetic construct
  misc_feature 1..23: note = Synthetic Polynucleotide
  source 1..23: mol_type = other DNA
ggaagyggcgtgctgtgctgagg

SEQ ID NO: 2272 - DNA, 23 bp, synthetic construct
  misc_feature 1..23: note = Synthetic Polynucleotide
  source 1..23: mol_type = other DNA
aaatctyagagtgtcccatctgg

SEQ ID NO: 2273 - DNA, 23 bp, synthetic construct
  misc_feature 1..23: note = Synthetic Polynucleotide
  source 1..23: mol_type = other DNA
gtcytaggccccaaaaattttgg

SEQ ID NO: 2274 - DNA, 23 bp, synthetic construct
  misc_feature 1..23: note = Synthetic Polynucleotide
  source 1..23: mol_type = other DNA
ccayctggggaggtaggttcagg

SEQ ID NO: 2275 - DNA, 23 bp, synthetic construct
  misc_feature 1..23: note = Synthetic Polynucleotide
  source 1..23: mol_type = other DNA
gaccaytgcgctgcccgcgcagg

SEQ ID NO: 2276 - DNA, 23 bp, synthetic construct
  misc_feature 1..23: note = Synthetic Polynucleotide
  source 1..23: mol_type = other DNA
accaytgcgctgcccgcgcaggg

SEQ ID NO: 2277 - DNA, 23 bp, synthetic construct
  misc_feature 1..23: note = Synthetic Polynucleotide
  source 1..23: mol_type = other DNA
ccaytgcgctgcccgcgcagggg

SEQ ID NO: 2278 - DNA, 23 bp, synthetic construct
  misc_feature 1..23: note = Synthetic Polynucleotide
  source 1..23: mol_type = other DNA
cgcccaygttccccgcaggccgg

SEQ ID NO: 2279 - DNA, 23 bp, synthetic construct
  misc_feature 1..23: note = Synthetic Polynucleotide
  source 1..23: mol_type = other DNA
tccygctggccctcgcggcctgg

SEQ ID NO: 2280 - DNA, 23 bp, synthetic construct
  misc_feature 1..23: note = Synthetic Polynucleotide
  source 1..23: mol_type = other DNA
cctcatcytcaaggccgccgtgg

SEQ ID NO: 2281 - DNA, 23 bp, synthetic construct
  misc_feature 1..23: note = Synthetic Polynucleotide
  source 1..23: mol_type = other DNA
tcggcygcaccccaagttcgtgg

SEQ ID NO: 2282 - DNA, 23 bp, synthetic construct
  misc_feature 1..23: note = Synthetic Polynucleotide
  source 1..23: mol_type = other DNA
aggacctygctgggaaacaatgg

SEQ ID NO: 2283 - DNA, 23 bp, synthetic construct
  misc_feature 1..23: note = Synthetic Polynucleotide
  source 1..23: mol_type = other DNA
acctygctgggaaacaatggtgg

SEQ ID NO: 2284 - DNA, 23 bp, synthetic construct
  misc_feature 1..23: note = Synthetic Polynucleotide
  source 1..23: mol_type = other DNA
cctygctgggaaacaatggtggg

SEQ ID NO: 2285 - DNA, 23 bp, synthetic construct
  misc_feature 1..23: note = Synthetic Polynucleotide
  source 1..23: mol_type = other DNA
ggaggctyacgatgagtgcctgg

SEQ ID NO: 2286 - DNA, 23 bp, synthetic construct
  misc_feature 1..23: note = Synthetic Polynucleotide
  source 1..23: mol_type = other DNA
ggctyacgatgagtgcctggagg

SEQ ID NO: 2287 - DNA, 23 bp, synthetic construct
  misc_feature 1..23: note = Synthetic Polynucleotide
  source 1..23: mol_type = other DNA
ggtgcctytgacgagcacatagg

SEQ ID NO: 2288 - DNA, 23 bp, synthetic construct
  misc_feature 1..23: note = Synthetic Polynucleotide
  source 1..23: mol_type = other DNA
ggcgctaygagttctttcgaggg

SEQ ID NO: 2289 - DNA, 23 bp, synthetic construct
  misc_feature 1..23: note = Synthetic Polynucleotide
  source 1..23: mol_type = other DNA
gcgctaygagttctttcgagggg

SEQ ID NO: 2290 - DNA, 23 bp, synthetic construct
  misc_feature 1..23: note = Synthetic Polynucleotide
  source 1..23: mol_type = other DNA
cccccaygacgtgctggctgcgg

SEQ ID NO: 2291 - DNA, 23 bp, synthetic construct
  misc_feature 1..23: note = Synthetic Polynucleotide
  source 1..23: mol_type = other DNA
ccccaygacgtgctggctgcggg

SEQ ID NO: 2292 - DNA, 23 bp, synthetic construct
  misc_feature 1..23: note = Synthetic Polynucleotide
  source 1..23: mol_type = other DNA
cccaygacgtgctggctgcgggg

SEQ ID NO: 2293 - DNA, 23 bp, synthetic construct
  misc_feature 1..23: note = Synthetic Polynucleotide
  source 1..23: mol_type = other DNA
gccagayactttgtgaagtaagg

SEQ ID NO: 2294 - DNA, 23 bp, synthetic construct
  misc_feature 1..23: note = Synthetic Polynucleotide
  source 1..23: mol_type = other DNA
ccagayactttgtgaagtaaggg

SEQ ID NO: 2295 - DNA, 23 bp, synthetic construct
  misc_feature 1..23: note = Synthetic Polynucleotide
  source 1..23: mol_type = other DNA
gcagccyggagcatgggctgtgg

SEQ ID NO: 2296 - DNA, 23 bp, synthetic construct
  misc_feature 1..23: note = Synthetic Polynucleotide
  source 1..23: mol_type = other DNA
agcyggtattccctctcgagtgg

SEQ ID NO: 2297 - DNA, 23 bp, synthetic construct
  misc_feature 1..23: note = Synthetic Polynucleotide
  source 1..23: mol_type = other DNA
ctcacctycaacatcactgcggg

SEQ ID NO: 2298 - DNA, 23 bp, synthetic construct
  misc_feature 1..23: note = Synthetic Polynucleotide
  source 1..23: mol_type = other DNA
gtcgagaygctggccagctacgg

SEQ ID NO: 2299 - DNA, 23 bp, synthetic construct
  misc_feature 1..23: note = Synthetic Polynucleotide
  source 1..23: mol_type = other DNA
tcgagaygctggccagctacggg

SEQ ID NO: 2300 - DNA, 23 bp, synthetic construct
  misc_feature 1..23: note = Synthetic Polynucleotide
  source 1..23: mol_type = other DNA
cctgtacycgggctcccagaagg

SEQ ID NO: 2301 - DNA, 23 bp, synthetic construct
  misc_feature 1..23: note = Synthetic Polynucleotide
  source 1..23: mol_type = other DNA
aagayggtgacagaaaaggcagg

SEQ ID NO: 2302 - DNA, 23 bp, synthetic construct
  misc_feature 1..23: note = Synthetic Polynucleotide
  source 1..23: mol_type = other DNA
cgtgcyggcctcgcgcatggtgg

SEQ ID NO: 2303 - DNA, 23 bp, synthetic construct
  misc_feature 1..23: note = Synthetic Polynucleotide
  source 1..23: mol_type = other DNA
tattcagyctaaaagcagcaagg

SEQ ID NO: 2304 - DNA, 23 bp, synthetic construct
  misc_feature 1..23: note = Synthetic Polynucleotide
  source 1..23: mol_type = other DNA
cctgcyggccaactccaaagtgg

SEQ ID NO: 2305 - DNA, 23 bp, synthetic construct
  misc_feature 1..23: note = Synthetic Polynucleotide
  source 1..23: mol_type = other DNA
tgcytcttcaactaaaatacagg

SEQ ID NO: 2306 - DNA, 23 bp, synthetic construct
  misc_feature 1..23: note = Synthetic Polynucleotide
  source 1..23: mol_type = other DNA
aaaatcygtgccaagcaaccagg

SEQ ID NO: 2307 - DNA, 23 bp, synthetic construct
  misc_feature 1..23: note = Synthetic Polynucleotide
  source 1..23: mol_type = other DNA
aaatcygtgccaagcaaccaggg

SEQ ID NO: 2308 - DNA, 23 bp, synthetic construct
  misc_feature 1..23: note = Synthetic Polynucleotide
  source 1..23: mol_type = other DNA
aatcygtgccaagcaaccagggg

SEQ ID NO: 2309 - DNA, 23 bp, synthetic construct
  misc_feature 1..23: note = Synthetic Polynucleotide
  source 1..23: mol_type = other DNA
agatayggcttctaaaccgaagg

SEQ ID NO: 2310 - DNA, 23 bp, synthetic construct
  misc_feature 1..23: note = Synthetic Polynucleotide
  source 1..23: mol_type = other DNA
caagttcyccgaggtgagtccgg

SEQ ID NO: 2311 - DNA, 23 bp, synthetic construct
  misc_feature 1..23: note = Synthetic Polynucleotide
  source 1..23: mol_type = other DNA
aagttcyccgaggtgagtccggg

SEQ ID NO: 2312 - DNA, 23 bp, synthetic construct
  misc_feature 1..23: note = Synthetic Polynucleotide
  source 1..23: mol_type = other DNA
agttcyccgaggtgagtccgggg

SEQ ID NO: 2313 - DNA, 23 bp, synthetic construct
  misc_feature 1..23: note = Synthetic Polynucleotide
  source 1..23: mol_type = other DNA
agcctytggagtgataccacagg

SEQ ID NO: 2314 - DNA, 23 bp, synthetic construct
  misc_feature 1..23: note = Synthetic Polynucleotide
  source 1..23: mol_type = other DNA
agcacytgtgaggaagttcctgg

SEQ ID NO: 2315 - DNA, 23 bp, synthetic construct
  misc_feature 1..23: note = Synthetic Polynucleotide
  source 1..23: mol_type = other DNA
gcacytgtgaggaagttcctggg

SEQ ID NO: 2316 - DNA, 23 bp, synthetic construct
  misc_feature 1..23: note = Synthetic Polynucleotide
  source 1..23: mol_type = other DNA
cacytgtgaggaagttcctgggg

SEQ ID NO: 2317 - DNA, 23 bp, synthetic construct
  misc_feature 1..23: note = Synthetic Polynucleotide
  source 1..23: mol_type = other DNA
ctttgtcyatggtgagtctgggg

SEQ ID NO: 2318 - DNA, 23 bp, synthetic construct
  misc_feature 1..23: note = Synthetic Polynucleotide
  source 1..23: mol_type = other DNA
tctgyggaccaaaatcattctgg

SEQ ID NO: 2319 - DNA, 23 bp, synthetic construct
  misc_feature 1..23: note = Synthetic Polynucleotide
  source 1..23: mol_type = other DNA
ggagcygccctcgccagggaagg

SEQ ID NO: 2320 - DNA, 23 bp, synthetic construct
  misc_feature 1..23: note = Synthetic Polynucleotide
  source 1..23: mol_type = other DNA
caagaayagtaggtaaggccagg

SEQ ID NO: 2321 - DNA, 23 bp, synthetic construct
  misc_feature 1..23: note = Synthetic Polynucleotide
  source 1..23: mol_type = other DNA
gcacytgtgatcaacatgcgagg

SEQ ID NO: 2322 - DNA, 23 bp, synthetic construct
  misc_feature 1..23: note = Synthetic Polynucleotide
  source 1..23: mol_type = other DNA
cactcycgctcattcactcccgg

SEQ ID NO: 2323 - DNA, 23 bp, synthetic construct
  misc_feature 1..23: note = Synthetic Polynucleotide
  source 1..23: mol_type = other DNA
ttgayagggagcaagcagttcgg

SEQ ID NO: 2324 - DNA, 23 bp, synthetic construct
  misc_feature 1..23: note = Synthetic Polynucleotide
  source 1..23: mol_type = other DNA
tgayagggagcaagcagttcggg

SEQ ID NO: 2325 - DNA, 23 bp, synthetic construct
  misc_feature 1..23: note = Synthetic Polynucleotide
  source 1..23: mol_type = other DNA
ggacygtggctgccctctcaagg

SEQ ID NO: 2326 - DNA, 23 bp, synthetic construct
  misc_feature 1..23: note = Synthetic Polynucleotide
  source 1..23: mol_type = other DNA
agayggcgggatccaggcaaagg

SEQ ID NO: 2327 - DNA, 23 bp, synthetic construct
  misc_feature 1..23: note = Synthetic Polynucleotide
  source 1..23: mol_type = other DNA
tttytttttttttttttttgagg

SEQ ID NO: 2328 - DNA, 23 bp, synthetic construct
  misc_feature 1..23: note = Synthetic Polynucleotide
  source 1..23: mol_type = other DNA
tgatgygaggctgccgccgcagg

SEQ ID NO: 2329 - DNA, 23 bp, synthetic construct
  misc_feature 1..23: note = Synthetic Polynucleotide
  source 1..23: mol_type = other DNA
caaccyggccctcagctactcgg

SEQ ID NO: 2330 - DNA, 23 bp, synthetic construct
  misc_feature 1..23: note = Synthetic Polynucleotide
  source 1..23: mol_type = other DNA
ttctycggcttagaggtgactgg

SEQ ID NO: 2331 - DNA, 23 bp, synthetic construct
  misc_feature 1..23: note = Synthetic Polynucleotide
  source 1..23: mol_type = other DNA
gtcaygaaaaagccaagatgcgg

SEQ ID NO: 2332 - DNA, 23 bp, synthetic construct
  misc_feature 1..23: note = Synthetic Polynucleotide
  source 1..23: mol_type = other DNA
tcaygaaaaagccaagatgcggg

SEQ ID NO: 2333 - DNA, 23 bp, synthetic construct
  misc_feature 1..23: note = Synthetic Polynucleotide
  source 1..23: mol_type = other DNA
aaccycatctccctggtgagagg

SEQ ID NO: 2334 - DNA, 23 bp, synthetic construct
  misc_feature 1..23: note = Synthetic Polynucleotide
  source 1..23: mol_type = other DNA
cgagcytcgcgtggctcccgagg

SEQ ID NO: 2335 - DNA, 23 bp, synthetic construct
  misc_feature 1..23: note = Synthetic Polynucleotide
  source 1..23: mol_type = other DNA
tgggtgyccaataagaccgaagg

SEQ ID NO: 2336 - DNA, 23 bp, synthetic construct
  misc_feature 1..23: note = Synthetic Polynucleotide
  source 1..23: mol_type = other DNA
tatgtyctcctacgtcatgctgg

SEQ ID NO: 2337 - DNA, 23 bp, synthetic construct
  misc_feature 1..23: note = Synthetic Polynucleotide
  source 1..23: mol_type = other DNA
ctattgcytccaaacatttttgg

SEQ ID NO: 2338 - DNA, 23 bp, synthetic construct
  misc_feature 1..23: note = Synthetic Polynucleotide
  source 1..23: mol_type = other DNA
gtgcggyatttgtcctgctccgg

SEQ ID NO: 2339 - DNA, 23 bp, synthetic construct
  misc_feature 1..23: note = Synthetic Polynucleotide
  source 1..23: mol_type = other DNA
tgcggyatttgtcctgctccggg

SEQ ID NO: 2340 - DNA, 23 bp, synthetic construct
  misc_feature 1..23: note = Synthetic Polynucleotide
  source 1..23: mol_type = other DNA
aagaaaayctacgccatgggtgg

SEQ ID NO: 2341 - DNA, 23 bp, synthetic construct
  misc_feature 1..23: note = Synthetic Polynucleotide
  source 1..23: mol_type = other DNA
aaaayctacgccatgggtggagg

SEQ ID NO: 2342 - DNA, 23 bp, synthetic construct
  misc_feature 1..23: note = Synthetic Polynucleotide
  source 1..23: mol_type = other DNA
gacagagytcctccacaacatgg

SEQ ID NO: 2343 - DNA, 23 bp, synthetic construct
  misc_feature 1..23: note = Synthetic Polynucleotide
  source 1..23: mol_type = other DNA
cagaggtyctttgacagctttgg

SEQ ID NO: 2344 - DNA, 23 bp, synthetic construct
  misc_feature 1..23: note = Synthetic Polynucleotide
  source 1..23: mol_type = other DNA
ttcacytctaatggtgattatgg

SEQ ID NO: 2345 - DNA, 23 bp, synthetic construct
  misc_feature 1..23: note = Synthetic Polynucleotide
  source 1..23: mol_type = other DNA
tcacytctaatggtgattatggg

SEQ ID NO: 2346 - DNA, 23 bp, synthetic construct
  misc_feature 1..23: note = Synthetic Polynucleotide
  source 1..23: mol_type = other DNA
cagcaagbacgtgggcctctggg

SEQ ID NO: 2347 - DNA, 23 bp, synthetic construct
  misc_feature 1..23: note = Synthetic Polynucleotide
  source 1..23: mol_type = other DNA
agcaagbacgtgggcctctgggg

SEQ ID NO: 2348 - DNA, 23 bp, synthetic construct
  misc_feature 1..23: note = Synthetic Polynucleotide
  source 1..23: mol_type = other DNA
gcaagbacgtgggcctctggggg

SEQ ID NO: 2349 - DNA, 23 bp, synthetic construct
  misc_feature 1..23: note = Synthetic Polynucleotide
  source 1..23: mol_type = other DNA
ctgtgyaagtaatacaactttgg

SEQ ID NO: 2350 - DNA, 23 bp, synthetic construct
  misc_feature 1..23: note = Synthetic Polynucleotide
  source 1..23: mol_type = other DNA
cttcaytgtggtcattttcctgg

SEQ ID NO: 2351 - DNA, 23 bp, synthetic construct
  misc_feature 1..23: note = Synthetic Polynucleotide
  source 1..23: mol_type = other DNA
ttcaytgtggtcattttcctggg

SEQ ID NO: 2352 - DNA, 23 bp, synthetic construct
  misc_feature 1..23: note = Synthetic Polynucleotide
  source 1..23: mol_type = other DNA
atatagaygcctctgctcccagg

SEQ ID NO: 2353 - DNA, 23 bp, synthetic construct
  misc_feature 1..23: note = Synthetic Polynucleotide
  source 1..23: mol_type = other DNA
acttyatttgactactttaatgg

SEQ ID NO: 2354 - DNA, 23 bp, synthetic construct
  misc_feature 1..23: note = Synthetic Polynucleotide
  source 1..23: mol_type = other DNA
catcaytggccgcacactggtgg

SEQ ID NO: 2355 - DNA, 23 bp, synthetic construct
  misc_feature 1..23: note = Synthetic Polynucleotide
  source 1..23: mol_type = other DNA
cgttyggcttgtggtgtaattgg

SEQ ID NO: 2356 - DNA, 23 bp, synthetic construct
  misc_feature 1..23: note = Synthetic Polynucleotide
  source 1..23: mol_type = other DNA
gttyggcttgtggtgtaattggg

SEQ ID NO: 2357 - DNA, 23 bp, synthetic construct
  misc_feature 1..23: note = Synthetic Polynucleotide
  source 1..23: mol_type = other DNA
ggccagygtgtgtgtgagcctgg

SEQ ID NO: 2358 - DNA, 23 bp, synthetic construct
  misc_feature 1..23: note = Synthetic Polynucleotide
  source 1..23: mol_type = other DNA
tcaagtgygtccttccggagcgg

SEQ ID NO: 2359 - DNA, 23 bp, synthetic construct
  misc_feature 1..23: note = Synthetic Polynucleotide
  source 1..23: mol_type = other DNA
caagtgygtccttccggagcggg

SEQ ID NO: 2360 - DNA, 23 bp, synthetic construct
  misc_feature 1..23: note = Synthetic Polynucleotide
  source 1..23: mol_type = other DNA
aagtgygtccttccggagcgggg

SEQ ID NO: 2361 - DNA, 23 bp, synthetic construct
  misc_feature 1..23: note = Synthetic Polynucleotide
  source 1..23: mol_type = other DNA
agtgygtccttccggagcggggg

SEQ ID NO: 2362 - DNA, 23 bp, synthetic construct
  misc_feature 1..23: note = Synthetic Polynucleotide
  source 1..23: mol_type = other DNA
cctcaacygcgagcagtgtcagg

SEQ ID NO: 2363 - DNA, 23 bp, synthetic construct
  misc_feature 1..23: note = Synthetic Polynucleotide
  source 1..23: mol_type = other DNA
tctyggagggcgaggaggagagg

SEQ ID NO: 2364 - DNA, 23 bp, synthetic construct
  misc_feature 1..23: note = Synthetic Polynucleotide
  source 1..23: mol_type = other DNA
ggccaygggctacccggaggtgg

SEQ ID NO: 2365 - DNA, 23 bp, synthetic construct
  misc_feature 1..23: note = Synthetic Polynucleotide
  source 1..23: mol_type = other DNA
gttgcyggcgcgcctcgcagtgg

SEQ ID NO: 2366 - DNA, 23 bp, synthetic construct
  misc_feature 1..23: note = Synthetic Polynucleotide
  source 1..23: mol_type = other DNA
tggcygtcagttgcaaaaaaagg

SEQ ID NO: 2367 - DNA, 23 bp, synthetic construct
  misc_feature 1..23: note = Synthetic Polynucleotide
  source 1..23: mol_type = other DNA
atgcyggagttcagtttgtttgg

SEQ ID NO: 2368 - DNA, 23 bp, synthetic construct
  misc_feature 1..23: note = Synthetic Polynucleotide
  source 1..23: mol_type = other DNA
gagtttcycatctacgaaagagg

SEQ ID NO: 2369 - DNA, 23 bp, synthetic construct
  misc_feature 1..23: note = Synthetic Polynucleotide
  source 1..23: mol_type = other DNA
ctgccyctgatgagatcaagagg

SEQ ID NO: 2370 - DNA, 23 bp, synthetic construct
  misc_feature 1..23: note = Synthetic Polynucleotide
  source 1..23: mol_type = other DNA
catccycaccatcatcacactgg

SEQ ID NO: 2371 - DNA, 23 bp, synthetic construct
  misc_feature 1..23: note = Synthetic Polynucleotide
  source 1..23: mol_type = other DNA
aggtcaygtgcttccacccctgg

SEQ ID NO: 2372 - DNA, 23 bp, synthetic construct
  misc_feature 1..23: note = Synthetic Polynucleotide
  source 1..23: mol_type = other DNA
ccctygggtgcaggtttgtgagg

SEQ ID NO: 2373 - DNA, 23 bp, synthetic construct
  misc_feature 1..23: note = Synthetic Polynucleotide
  source 1..23: mol_type = other DNA
caggagcyactcaggaaggtggg

SEQ ID NO: 2374 - DNA, 23 bp, synthetic construct
  misc_feature 1..23: note = Synthetic Polynucleotide
  source 1..23: mol_type = other DNA
gcgctyggccgcgcgccttgagg

SEQ ID NO: 2375 - DNA, 23 bp, synthetic construct
  misc_feature 1..23: note = Synthetic Polynucleotide
  source 1..23: mol_type = other DNA
aacyggcactgggtcgcttttgg

SEQ ID NO: 2376 - DNA, 23 bp, synthetic construct
  misc_feature 1..23: note = Synthetic Polynucleotide
  source 1..23: mol_type = other DNA
acacygttcaggtattgggatgg

SEQ ID NO: 2377 - DNA, 23 bp, synthetic construct
  misc_feature 1..23: note = Synthetic Polynucleotide
  source 1..23: mol_type = other DNA
cgccygaccacgccgaccacagg

SEQ ID NO: 2378 - DNA, 23 bp, synthetic construct
  misc_feature 1..23: note = Synthetic Polynucleotide
  source 1..23: mol_type = other DNA
gccygaccacgccgaccacaggg

SEQ ID NO: 2379 - DNA, 23 bp, synthetic construct
  misc_feature 1..23: note = Synthetic Polynucleotide
  source 1..23: mol_type = other DNA
tccygcgctctgccactgtccgg

SEQ ID NO: 2380 - DNA, 23 bp, synthetic construct
  misc_feature 1..23: note = Synthetic Polynucleotide
  source 1..23: mol_type = other DNA
gggaaccygctgctcaccaccgg

SEQ ID NO: 2381 - DNA, 23 bp, synthetic construct
  misc_feature 1..23: note = Synthetic Polynucleotide
  source 1..23: mol_type = other DNA
aaccygctgctcaccaccggtgg

SEQ ID NO: 2382 - DNA, 23 bp, synthetic construct
  misc_feature 1..23: note = Synthetic Polynucleotide
  source 1..23: mol_type = other DNA
gggycactcaagggacagcccgg

SEQ ID NO: 2383 - DNA, 23 bp, synthetic construct
  misc_feature 1..23: note = Synthetic Polynucleotide
  source 1..23: mol_type = other DNA
ggaccygcctgtggatgcagtgg

SEQ ID NO: 2384 - DNA, 23 bp, synthetic construct
  misc_feature 1..23: note = Synthetic Polynucleotide
  source 1..23: mol_type = other DNA
ctaccyggacggcaggtgtgtgg

SEQ ID NO: 2385 - DNA, 23 bp, synthetic construct
  misc_feature 1..23: note = Synthetic Polynucleotide
  source 1..23: mol_type = other DNA
ggaacacygtccattggcatggg

SEQ ID NO: 2386 - DNA, 23 bp, synthetic construct
  misc_feature 1..23: note = Synthetic Polynucleotide
  source 1..23: mol_type = other DNA
gaacacygtccattggcatgggg

SEQ ID NO: 2387 - DNA, 23 bp, synthetic construct
  misc_feature 1..23: note = Synthetic Polynucleotide
  source 1..23: mol_type = other DNA
gctccygctgctctccgacacgg

SEQ ID NO: 2388 - DNA, 23 bp, synthetic construct
  misc_feature 1..23: note = Synthetic Polynucleotide
  source 1..23: mol_type = other DNA
ttcacaygtctgtgcatgccagg

SEQ ID NO: 2389 - DNA, 23 bp, synthetic construct
  misc_feature 1..23: note = Synthetic Polynucleotide
  source 1..23: mol_type = other DNA
gccgggygttggtctgtctctgg

SEQ ID NO: 2390 - DNA, 23 bp, synthetic construct
  misc_feature 1..23: note = Synthetic Polynucleotide
  source 1..23: mol_type = other DNA
atcattcytttgggaagtggagg

SEQ ID NO: 2391 - DNA, 23 bp, synthetic construct
  misc_feature 1..23: note = Synthetic Polynucleotide
  source 1..23: mol_type = other DNA
tcattcytttgggaagtggaggg

SEQ ID NO: 2392 - DNA, 23 bp, synthetic construct
  misc_feature 1..23: note = Synthetic Polynucleotide
  source 1..23: mol_type = other DNA
aactccaygtataagctgacagg

SEQ ID NO: 2393 - DNA, 23 bp, synthetic construct
  misc_feature 1..23: note = Synthetic Polynucleotide
  source 1..23: mol_type = other DNA
catcatgyccatcctggaagagg

SEQ ID NO: 2394 - DNA, 23 bp, synthetic construct
  misc_feature 1..23: note = Synthetic Polynucleotide
  source 1..23: mol_type = other DNA
gtagtctytcatgagaggagtgg

SEQ ID NO: 2395 - DNA, 23 bp, synthetic construct
  misc_feature 1..23: note = Synthetic Polynucleotide
  source 1..23: mol_type = other DNA
tcagaagyttttttcttcgcagg

SEQ ID NO: 2396 - DNA, 23 bp, synthetic construct
  misc_feature 1..23: note = Synthetic Polynucleotide
  source 1..23: mol_type = other DNA
ctccayggagttccctggcctgg

SEQ ID NO: 2397 - DNA, 23 bp, synthetic construct
  misc_feature 1..23: note = Synthetic Polynucleotide
  source 1..23: mol_type = other DNA
tccayggagttccctggcctggg

SEQ ID NO: 2398 - DNA, 23 bp, synthetic construct
  misc_feature 1..23: note = Synthetic Polynucleotide
  source 1..23: mol_type = other DNA
ccayggagttccctggcctgggg

SEQ ID NO: 2399 - DNA, 23 bp, synthetic construct
  misc_feature 1..23: note = Synthetic Polynucleotide
  source 1..23: mol_type = other DNA
gctcaygagggcacagagcatgg

SEQ ID NO: 2400 - DNA, 23 bp, synthetic construct
  misc_feature 1..23: note = Synthetic Polynucleotide
  source 1..23: mol_type = other DNA
atgcaaayatctgtctgaaacgg

SEQ ID NO: 2401 - DNA, 23 bp, synthetic construct
  misc_feature 1..23: note = Synthetic Polynucleotide
  source 1..23: mol_type = other DNA
cagtggygagactcgcccgcagg

SEQ ID NO: 2402 - DNA, 23 bp, synthetic construct
  misc_feature 1..23: note = Synthetic Polynucleotide
  source 1..23: mol_type = other DNA
agtggygagactcgcccgcaggg

SEQ ID NO: 2403 - DNA, 23 bp, synthetic construct
  misc_feature 1..23: note = Synthetic Polynucleotide
  source 1..23: mol_type = other DNA
agcaytgcaaccacattgtcagg

SEQ ID NO: 2404 - DNA, 23 bp, synthetic construct
  misc_feature 1..23: note = Synthetic Polynucleotide
  source 1..23: mol_type = other DNA
tgcccyccacctggggtcacagg

SEQ ID NO: 2405 - DNA, 23 bp, synthetic construct
  misc_feature 1..23: note = Synthetic Polynucleotide
  source 1..23: mol_type = other DNA
ctggggcyggtattcatgaaagg

SEQ ID NO: 2406 - DNA, 23 bp, synthetic construct
  misc_feature 1..23: note = Synthetic Polynucleotide
  source 1..23: mol_type = other DNA
cggtytgaagcgtgcagagatgg

SEQ ID NO: 2407 - DNA, 23 bp, synthetic construct
  misc_feature 1..23: note = Synthetic Polynucleotide
  source 1..23: mol_type = other DNA
ggataayatcaaacacgtcccgg

SEQ ID NO: 2408 - DNA, 23 bp, synthetic construct
  misc_feature 1..23: note = Synthetic Polynucleotide
  source 1..23: mol_type = other DNA
gataayatcaaacacgtcccggg

SEQ ID NO: 2409 - DNA, 23 bp, synthetic construct
  misc_feature 1..23: note = Synthetic Polynucleotide
  source 1..23: mol_type = other DNA
accytatgatccgcccgccttgg

SEQ ID NO: 2410 - DNA, 23 bp, synthetic construct
  misc_feature 1..23: note = Synthetic Polynucleotide
  source 1..23: mol_type = other DNA
ccaygtggaccctggtgagctgg

SEQ ID NO: 2411 - DNA, 23 bp, synthetic construct
  misc_feature 1..23: note = Synthetic Polynucleotide
  source 1..23: mol_type = other DNA
gccyggggaaaaacagagtcagg

SEQ ID NO: 2412 - DNA, 23 bp, synthetic construct
  misc_feature 1..23: note = Synthetic Polynucleotide
  source 1..23: mol_type = other DNA
gtaatcygcaaaggaggagaagg

SEQ ID NO: 2413 - DNA, 23 bp, synthetic construct
  misc_feature 1..23: note = Synthetic Polynucleotide
  source 1..23: mol_type = other DNA
taatcygcaaaggaggagaaggg

SEQ ID NO: 2414 - DNA, 23 bp, synthetic construct
  misc_feature 1..23: note = Synthetic Polynucleotide
  source 1..23: mol_type = other DNA
cccyacccaacgctgccgcctgg

SEQ ID NO: 2415 - DNA, 23 bp, synthetic construct
  misc_feature 1..23: note = Synthetic Polynucleotide
  source 1..23: mol_type = other DNA
caatcyacttctcccgccgccgg

SEQ ID NO: 2416 - DNA, 23 bp, synthetic construct
  misc_feature 1..23: note = Synthetic Polynucleotide
  source 1..23: mol_type = other DNA
aatcyacttctcccgccgccggg

SEQ ID NO: 2417 - DNA, 23 bp, synthetic construct
  misc_feature 1..23: note = Synthetic Polynucleotide
  source 1..23: mol_type = other DNA
aaggaaygtgttttacccggagg

SEQ ID NO: 2418 - DNA, 23 bp, synthetic construct
  misc_feature 1..23: note = Synthetic Polynucleotide
  source 1..23: mol_type = other DNA
ctgccagygcctgctgaagaagg

SEQ ID NO: 2419 - DNA, 23 bp, synthetic construct
  misc_feature 1..23: note = Synthetic Polynucleotide
  source 1..23: mol_type = other DNA
ccagygcctgctgaagaaggagg

SEQ ID NO: 2420 - DNA, 23 bp, synthetic construct
  misc_feature 1..23: note = Synthetic Polynucleotide
  source 1..23: mol_type = other DNA
aaactggyccttatacctgttgg

SEQ ID NO: 2421 - DNA, 23 bp, synthetic construct
  misc_feature 1..23: note = Synthetic Polynucleotide
  source 1..23: mol_type = other DNA
aactggyccttatacctgttggg

SEQ ID NO: 2422 - DNA, 23 bp, synthetic construct
  misc_feature 1..23: note = Synthetic Polynucleotide
  source 1..23: mol_type = other DNA
ctgtgtgygccagggctgtgggg

SEQ ID NO: 2423 - DNA, 23 bp, synthetic construct
  misc_feature 1..23: note = Synthetic Polynucleotide
  source 1..23: mol_type = other DNA
cctytaaccgcagcatccatcgg

SEQ ID NO: 2424 - DNA, 23 bp, synthetic construct
  misc_feature 1..23: note = Synthetic Polynucleotide
  source 1..23: mol_type = other DNA
ggtctctygcggtgtggaaaggg

SEQ ID NO: 2425 - DNA, 23 bp, synthetic construct
  misc_feature 1..23: note = Synthetic Polynucleotide
  source 1..23: mol_type = other DNA
ttaycccatctcagtaaccgtgg

SEQ ID NO: 2426 - DNA, 23 bp, synthetic construct
  misc_feature 1..23: note = Synthetic Polynucleotide
  source 1..23: mol_type = other DNA
ttgcygaaggagctgagatgagg

SEQ ID NO: 2427 - DNA, 23 bp, synthetic construct
  misc_feature 1..23: note = Synthetic Polynucleotide
  source 1..23: mol_type = other DNA
ggcaytccgagtctttgacaagg

SEQ ID NO: 2428 - DNA, 23 bp, synthetic construct
  misc_feature 1..23: note = Synthetic Polynucleotide
  source 1..23: mol_type = other DNA
tccayggtcaagtcagcctcagg

SEQ ID NO: 2429 - DNA, 23 bp, synthetic construct
  misc_feature 1..23: note = Synthetic Polynucleotide
  source 1..23: mol_type = other DNA
ccayggtcaagtcagcctcaggg

SEQ ID NO: 2430 - DNA, 23 bp, synthetic construct
  misc_feature 1..23: note = Synthetic Polynucleotide
  source 1..23: mol_type = other DNA
taatccayaatttgtcatcctgg

SEQ ID NO: 2431 - DNA, 23 bp, synthetic construct
  misc_feature 1..23: note = Synthetic Polynucleotide
  source 1..23: mol_type = other DNA
gctytgctttggatggacaatgg

SEQ ID NO: 2432 - DNA, 23 bp, synthetic construct
  misc_feature 1..23: note = Synthetic Polynucleotide
  source 1..23: mol_type = other DNA
tgagayggcccacctgggcttgg

SEQ ID NO: 2433 - DNA, 23 bp, synthetic construct
  misc_feature 1..23: note = Synthetic Polynucleotide
  source 1..23: mol_type = other DNA
gagayggcccacctgggcttggg

SEQ ID NO: 2434 - DNA, 23 bp, synthetic construct
  misc_feature 1..23: note = Synthetic Polynucleotide
  source 1..23: mol_type = other DNA
tcactcaygttcatgcaatgggg

SEQ ID NO: 2435 - DNA, 23 bp, synthetic construct
  misc_feature 1..23: note = Synthetic Polynucleotide
  source 1..23: mol_type = other DNA
gcaggacygccccattgcctggg

SEQ ID NO: 2436 - DNA, 23 bp, synthetic construct
  misc_feature 1..23: note = Synthetic Polynucleotide
  source 1..23: mol_type = other DNA
catgygagtgcaggcggagcagg

SEQ ID NO: 2437 - DNA, 23 bp, synthetic construct
  misc_feature 1..23: note = Synthetic Polynucleotide
  source 1..23: mol_type = other DNA
tatggyccaagatcgaacgcagg

SEQ ID NO: 2438 - DNA, 23 bp, synthetic construct
  misc_feature 1..23: note = Synthetic Polynucleotide
  source 1..23: mol_type = other DNA
taaatgaytgagtttgcccttgg

SEQ ID NO: 2439 - DNA, 23 bp, synthetic construct
  misc_feature 1..23: note = Synthetic Polynucleotide
  source 1..23: mol_type = other DNA
gcccgacygcgggatgctggtgg

SEQ ID NO: 2440 - DNA, 23 bp, synthetic construct
  misc_feature 1..23: note = Synthetic Polynucleotide
  source 1..23: mol_type = other DNA
aaggcyacatgaactaaccaagg

SEQ ID NO: 2441 - DNA, 23 bp, synthetic construct
  misc_feature 1..23: note = Synthetic Polynucleotide
  source 1..23: mol_type = other DNA
caggcgycctcttgctcagccgg

SEQ ID NO: 2442 - DNA, 23 bp, synthetic construct
  misc_feature 1..23: note = Synthetic Polynucleotide
  source 1..23: mol_type = other DNA
cggagtcygttctccagggcagg

SEQ ID NO: 2443 - DNA, 23 bp, synthetic construct
  misc_feature 1..23: note = Synthetic Polynucleotide
  source 1..23: mol_type = other DNA
ctgcyacctagagttgcgctcgg

SEQ ID NO: 2444 - DNA, 23 bp, synthetic construct
  misc_feature 1..23: note = Synthetic Polynucleotide
  source 1..23: mol_type = other DNA
ccaagygagtacagcgcacctgg

SEQ ID NO: 2445 - DNA, 23 bp, synthetic construct
  misc_feature 1..23: note = Synthetic Polynucleotide
  source 1..23: mol_type = other DNA
caagygagtacagcgcacctggg

SEQ ID NO: 2446 - DNA, 23 bp, synthetic construct
  misc_feature 1..23: note = Synthetic Polynucleotide
  source 1..23: mol_type = other DNA
aagygagtacagcgcacctgggg

SEQ ID NO: 2447 - DNA, 23 bp, synthetic construct
  misc_feature 1..23: note = Synthetic Polynucleotide
  source 1..23: mol_type = other DNA
acggctcycatcaactccactgg

SEQ ID NO: 2448 - DNA, 23 bp, synthetic construct
  misc_feature 1..23: note = Synthetic Polynucleotide
  source 1..23: mol_type = other DNA
cggctcycatcaactccactggg

SEQ ID NO: 2449 - DNA, 23 bp, synthetic construct
  misc_feature 1..23: note = Synthetic Polynucleotide
  source 1..23: mol_type = other DNA
ggctcycatcaactccactgggg

SEQ ID NO: 2450 - DNA, 23 bp, synthetic construct
  misc_feature 1..23: note = Synthetic Polynucleotide
  source 1..23: mol_type = other DNA
ggtgcygcggatcggcctgctgg

SEQ ID NO: 2451 - DNA, 23 bp, synthetic construct
  misc_feature 1..23: note = Synthetic Polynucleotide
  source 1..23: mol_type = other DNA
gtgcygcggatcggcctgctggg

SEQ ID NO: 2452 - DNA, 23 bp, synthetic construct
  misc_feature 1..23: note = Synthetic Polynucleotide
  source 1..23: mol_type = other DNA
gtgcygctgttcttaacccacgg

SEQ ID NO: 2453 - DNA, 23 bp, synthetic construct
  misc_feature 1..23: note = Synthetic Polynucleotide
  source 1..23: mol_type = other DNA
tgcygctgttcttaacccacggg

SEQ ID NO: 2454 - DNA, 23 bp, synthetic construct
  misc_feature 1..23: note = Synthetic Polynucleotide
  source 1..23: mol_type = other DNA
gctcatcyccttcagtgacaagg

SEQ ID NO: 2455 - DNA, 23 bp, synthetic construct
  misc_feature 1..23: note = Synthetic Polynucleotide
  source 1..23: mol_type = other DNA
ggggcygtgacgaccagcccagg

SEQ ID NO: 2456 - DNA, 23 bp, synthetic construct
  misc_feature 1..23: note = Synthetic Polynucleotide
  source 1..23: mol_type = other DNA
gtatcygcatgggcgcctgcagg

SEQ ID NO: 2457 - DNA, 23 bp, synthetic construct
  misc_feature 1..23: note = Synthetic Polynucleotide
  source 1..23: mol_type = other DNA
ggaagyagtggtggaagtagagg

SEQ ID NO: 2458 - DNA, 23 bp, synthetic construct
  misc_feature 1..23: note = Synthetic Polynucleotide
  source 1..23: mol_type = other DNA
gaaatcayaggacaagcctttgg

SEQ ID NO: 2459 - DNA, 23 bp, synthetic construct
  misc_feature 1..23: note = Synthetic Polynucleotide
  source 1..23: mol_type = other DNA
ctcayaggccattgcgaccacgg

SEQ ID NO: 2460 - DNA, 23 bp, synthetic construct
  misc_feature 1..23: note = Synthetic Polynucleotide
  source 1..23: mol_type = other DNA
gagccyccagagcttgttgaagg

SEQ ID NO: 2461 - DNA, 23 bp, synthetic construct
  misc_feature 1..23: note = Synthetic Polynucleotide
  source 1..23: mol_type = other DNA
attgtacycagagcactagaagg

SEQ ID NO: 2462 - DNA, 23 bp, synthetic construct
  misc_feature 1..23: note = Synthetic Polynucleotide
  source 1..23: mol_type = other DNA
aggyaacccttaatactacctgg

SEQ ID NO: 2463 - DNA, 23 bp, synthetic construct
  misc_feature 1..23: note = Synthetic Polynucleotide
  source 1..23: mol_type = other DNA
gaacggygcgcggacccgggcgg

SEQ ID NO: 2464 - DNA, 23 bp, synthetic construct
  misc_feature 1..23: note = Synthetic Polynucleotide
  source 1..23: mol_type = other DNA
aacggygcgcggacccgggcggg

SEQ ID NO: 2465 - DNA, 23 bp, synthetic construct
  misc_feature 1..23: note = Synthetic Polynucleotide
  source 1..23: mol_type = other DNA
acttcygtgagaacaagctcagg

SEQ ID NO: 2466 - DNA, 23 bp, synthetic construct
  misc_feature 1..23: note = Synthetic Polynucleotide
  source 1..23: mol_type = other DNA
caagctytgataccttcagttgg

SEQ ID NO: 2467 - DNA, 23 bp, synthetic construct
  misc_feature 1..23: note = Synthetic Polynucleotide
  source 1..23: mol_type = other DNA
aagctytgataccttcagttggg

SEQ ID NO: 2468 - DNA, 23 bp, synthetic construct
  misc_feature 1..23: note = Synthetic Polynucleotide
  source 1..23: mol_type = other DNA
cctccaygactttttcaaaaagg

SEQ ID NO: 2469 - DNA, 23 bp, synthetic construct
  misc_feature 1..23: note = Synthetic Polynucleotide
  source 1..23: mol_type = other DNA
cgaaatgyaagtctagttagagg

SEQ ID NO: 2470 - DNA, 23 bp, synthetic construct
  misc_feature 1..23: note = Synthetic Polynucleotide
  source 1..23: mol_type = other DNA
gaaatgyaagtctagttagaggg

SEQ ID NO: 2471 - DNA, 23 bp, synthetic construct
  misc_feature 1..23: note = Synthetic Polynucleotide
  source 1..23: mol_type = other DNA
gagaagaygacccaggtgagtgg

SEQ ID NO: 2472 - DNA, 23 bp, synthetic construct
  misc_feature 1..23: note = Synthetic Polynucleotide
  source 1..23: mol_type = other DNA
cgtcygatcaaaggcgccaaagg

SEQ ID NO: 2473 - DNA, 23 bp, synthetic construct
  misc_feature 1..23: note = Synthetic Polynucleotide
  source 1..23: mol_type = other DNA
gtcygatcaaaggcgccaaaggg

SEQ ID NO: 2474 - DNA, 23 bp, synthetic construct
  misc_feature 1..23: note = Synthetic Polynucleotide
  source 1..23: mol_type = other DNA
gcttttyttcaagctgcccaagg

SEQ ID NO: 2475 - DNA, 23 bp, synthetic construct
  misc_feature 1..23: note = Synthetic Polynucleotide
  source 1..23: mol_type = other DNA
tactaccyggaccaggtgggtgg

SEQ ID NO: 2476 - DNA, 23 bp, synthetic construct
  misc_feature 1..23: note = Synthetic Polynucleotide
  source 1..23: mol_type = other DNA
actaccyggaccaggtgggtggg

SEQ ID NO: 2477 - DNA, 23 bp, synthetic construct
  misc_feature 1..23: note = Synthetic Polynucleotide
  source 1..23: mol_type = other DNA
ctaccyggaccaggtgggtgggg

SEQ ID NO: 2478 - DNA, 23 bp, synthetic construct
  misc_feature 1..23: note = Synthetic Polynucleotide
  source 1..23: mol_type = other DNA
aggcaytggggacgagatcgagg

SEQ ID NO: 2479 - DNA, 23 bp, synthetic construct
  misc_feature 1..23: note = Synthetic Polynucleotide
  source 1..23: mol_type = other DNA
gtacgtgyctgtgaacggcaagg

SEQ ID NO: 2480 - DNA, 23 bp, synthetic construct
  misc_feature 1..23: note = Synthetic Polynucleotide
  source 1..23: mol_type = other DNA
tacgtgyctgtgaacggcaaggg

SEQ ID NO: 2481 - DNA, 23 bp, synthetic construct
  misc_feature 1..23: note = Synthetic Polynucleotide
  source 1..23: mol_type = other DNA
ccgccygcctgtgaagtggatgg

SEQ ID NO: 2482 - DNA, 23 bp, synthetic construct
  misc_feature 1..23: note = Synthetic Polynucleotide
  source 1..23: mol_type = other DNA
gaatcccyaccctggcatcctgg

SEQ ID NO: 2483 - DNA, 23 bp, synthetic construct
  misc_feature 1..23: note = Synthetic Polynucleotide
  source 1..23: mol_type = other DNA
ggagactyccgctactcagatgg

SEQ ID NO: 2484 - DNA, 23 bp, synthetic construct
  misc_feature 1..23: note = Synthetic Polynucleotide
  source 1..23: mol_type = other DNA
gagactyccgctactcagatggg

SEQ ID NO: 2485 - DNA, 23 bp, synthetic construct
  misc_feature 1..23: note = Synthetic Polynucleotide
  source 1..23: mol_type = other DNA
agccygtacccatggaggtaagg

SEQ ID NO: 2486 - DNA, 23 bp, synthetic construct
  misc_feature 1..23: note = Synthetic Polynucleotide
  source 1..23: mol_type = other DNA
gccygtacccatggaggtaaggg

SEQ ID NO: 2487 - DNA, 23 bp, synthetic construct
  misc_feature 1..23: note = Synthetic Polynucleotide
  source 1..23: mol_type = other DNA
gcagayctgctccttccttcagg

SEQ ID NO: 2488 - DNA, 23 bp, synthetic construct
  misc_feature 1..23: note = Synthetic Polynucleotide
  source 1..23: mol_type = other DNA
ggccacaygtgtcaatgtggtgg

SEQ ID NO: 2489 - DNA, 23 bp, synthetic construct
  misc_feature 1..23: note = Synthetic Polynucleotide
  source 1..23: mol_type = other DNA
gccacaygtgtcaatgtggtggg

SEQ ID NO: 2490 - DNA, 23 bp, synthetic construct
  misc_feature 1..23: note = Synthetic Polynucleotide
  source 1..23: mol_type = other DNA
atggcacygccagtgcaaacagg

SEQ ID NO: 2491 - DNA, 23 bp, synthetic construct
  misc_feature 1..23: note = Synthetic Polynucleotide
  source 1..23: mol_type = other DNA
tgcyctccaagcagcactaccgg

SEQ ID NO: 2492 - DNA, 23 bp, synthetic construct
  misc_feature 1..23: note = Synthetic Polynucleotide
  source 1..23: mol_type = other DNA
ggaccyggcgcgggagccgctgg

SEQ ID NO: 2493 - DNA, 23 bp, synthetic construct
  misc_feature 1..23: note = Synthetic Polynucleotide
  source 1..23: mol_type = other DNA
tttcytctggctagaattgctgg

SEQ ID NO: 2494 - DNA, 23 bp, synthetic construct
  misc_feature 1..23: note = Synthetic Polynucleotide
  source 1..23: mol_type = other DNA
acctgygggtgcgtggctgcagg

SEQ ID NO: 2495 - DNA, 23 bp, synthetic construct
  misc_feature 1..23: note = Synthetic Polynucleotide
  source 1..23: mol_type = other DNA
cctgygggtgcgtggctgcaggg

SEQ ID NO: 2496 - DNA, 23 bp, synthetic construct
  misc_feature 1..23: note = Synthetic Polynucleotide
  source 1..23: mol_type = other DNA
tgcyaaaagacccaaaacaaagg

SEQ ID NO: 2497 - DNA, 23 bp, synthetic construct
  misc_feature 1..23: note = Synthetic Polynucleotide
  source 1..23: mol_type = other DNA
aacaayggtggaacctgagaagg

SEQ ID NO: 2498 - DNA, 23 bp, synthetic construct
  misc_feature 1..23: note = Synthetic Polynucleotide
  source 1..23: mol_type = other DNA
tggacyatggtgagacctccagg

SEQ ID NO: 2499 - DNA, 23 bp, synthetic construct
  misc_feature 1..23: note = Synthetic Polynucleotide
  source 1..23: mol_type = other DNA
caaaggcytcttcttgctggtgg

SEQ ID NO: 2500 - DNA, 23 bp, synthetic construct
  misc_feature 1..23: note = Synthetic Polynucleotide
  source 1..23: mol_type = other DNA
ggcytcttcttgctggtggaagg

SEQ ID NO: 2501 - DNA, 23 bp, synthetic construct
  misc_feature 1..23: note = Synthetic Polynucleotide
  source 1..23: mol_type = other DNA
ccccyactcctattccaccacgg

SEQ ID NO: 2502 - DNA, 23 bp, synthetic construct
  misc_feature 1..23: note = Synthetic Polynucleotide
  source 1..23: mol_type = other DNA
gaagcygccgaagtccctgtcgg

SEQ ID NO: 2503 - DNA, 23 bp, synthetic construct
  misc_feature 1..23: note = Synthetic Polynucleotide
  source 1..23: mol_type = other DNA
ccagygccttccaccaagccagg

SEQ ID NO: 2504 - DNA, 23 bp, synthetic construct
  misc_feature 1..23: note = Synthetic Polynucleotide
  source 1..23: mol_type = other DNA
ggagtycattttggtggacaagg

SEQ ID NO: 2505 - DNA, 23 bp, synthetic construct
  misc_feature 1..23: note = Synthetic Polynucleotide
  source 1..23: mol_type = other DNA
accaagcygctggatcccgaagg

SEQ ID NO: 2506 - DNA, 23 bp, synthetic construct
  misc_feature 1..23: note = Synthetic Polynucleotide
  source 1..23: mol_type = other DNA
aagcygctggatcccgaaggtgg

SEQ ID NO: 2507 - DNA, 23 bp, synthetic construct
  misc_feature 1..23: note = Synthetic Polynucleotide
  source 1..23: mol_type = other DNA
agcygctggatcccgaaggtggg

SEQ ID NO: 2508 - DNA, 23 bp, synthetic construct
  misc_feature 1..23: note = Synthetic Polynucleotide
  source 1..23: mol_type = other DNA
aagtytgatgcagaccagaaagg

SEQ ID NO: 2509 - DNA, 23 bp, synthetic construct
  misc_feature 1..23: note = Synthetic Polynucleotide
  source 1..23: mol_type = other DNA
tggggaayatacgtgcttggcgg

SEQ ID NO: 2510 - DNA, 23 bp, synthetic construct
  misc_feature 1..23: note = Synthetic Polynucleotide
  source 1..23: mol_type = other DNA
ggggaayatacgtgcttggcggg

SEQ ID NO: 2511 - DNA, 23 bp, synthetic construct
  misc_feature 1..23: note = Synthetic Polynucleotide
  source 1..23: mol_type = other DNA
aatgccyccacagtggtcggagg

SEQ ID NO: 2512 - DNA, 23 bp, synthetic construct
  misc_feature 1..23: note = Synthetic Polynucleotide
  source 1..23: mol_type = other DNA
gtggagcyggtagctaaagaagg

SEQ ID NO: 2513 - DNA, 23 bp, synthetic construct
  misc_feature 1..23: note = Synthetic Polynucleotide
  source 1..23: mol_type = other DNA
tggagcyggtagctaaagaaggg

SEQ ID NO: 2514 - DNA, 23 bp, synthetic construct
  misc_feature 1..23: note = Synthetic Polynucleotide
  source 1..23: mol_type = other DNA
ctccagcyggaaggatggcttgg

SEQ ID NO: 2515 - DNA, 23 bp, synthetic construct
  misc_feature 1..23: note = Synthetic Polynucleotide
  source 1..23: mol_type = other DNA
atgccyctgtggctgaggcgtgg

SEQ ID NO: 2516 - DNA, 23 bp, synthetic construct
  misc_feature 1..23: note = Synthetic Polynucleotide
  source 1..23: mol_type = other DNA
acttytatagtattgaataaagg

SEQ ID NO: 2517 - DNA, 23 bp, synthetic construct
  misc_feature 1..23: note = Synthetic Polynucleotide
  source 1..23: mol_type = other DNA
cttytatagtattgaataaaggg

SEQ ID NO: 2518 - DNA, 23 bp, synthetic construct
  misc_feature 1..23: note = Synthetic Polynucleotide
  source 1..23: mol_type = other DNA
acttttayagtattgaataaagg

SEQ ID NO: 2519 - DNA, 23 bp, synthetic construct
  misc_feature 1..23: note = Synthetic Polynucleotide
  source 1..23: mol_type = other DNA
cttttayagtattgaataaaggg

SEQ ID NO: 2520 - DNA, 23 bp, synthetic construct
  misc_feature 1..23: note = Synthetic Polynucleotide
  source 1..23: mol_type = other DNA
tgaggccygtggcctgctcctgg

SEQ ID NO: 2521 - DNA, 23 bp, synthetic construct
  misc_feature 1..23: note = Synthetic Polynucleotide
  source 1..23: mol_type = other DNA
gaggccygtggcctgctcctggg

SEQ ID NO: 2522 - DNA, 23 bp, synthetic construct
  misc_feature 1..23: note = Synthetic Polynucleotide
  source 1..23: mol_type = other DNA
cagcyatggccaggccccagtgg

SEQ ID NO: 2523 - DNA, 23 bp, synthetic construct
  misc_feature 1..23: note = Synthetic Polynucleotide
  source 1..23: mol_type = other DNA
caggyaacatctgtcccagcagg

SEQ ID NO: 2524 - DNA, 23 bp, synthetic construct
  misc_feature 1..23: note = Synthetic Polynucleotide
  source 1..23: mol_type = other DNA
aggyaacatctgtcccagcaggg

SEQ ID NO: 2525 - DNA, 23 bp, synthetic construct
  misc_feature 1..23: note = Synthetic Polynucleotide
  source 1..23: mol_type = other DNA
gagacygaagggccaggtggagg

SEQ ID NO: 2526 - DNA, 23 bp, synthetic construct
  misc_feature 1..23: note = Synthetic Polynucleotide
  source 1..23: mol_type = other DNA
gatgcyggcagggtcctggctgg

SEQ ID NO: 2527 - DNA, 23 bp, synthetic construct
  misc_feature 1..23: note = Synthetic Polynucleotide
  source 1..23: mol_type = other DNA
atgcyggcagggtcctggctggg

SEQ ID NO: 2528 - DNA, 23 bp, synthetic construct
  misc_feature 1..23: note = Synthetic Polynucleotide
  source 1..23: mol_type = other DNA
tgcyggcagggtcctggctgggg

SEQ ID NO: 2529 - DNA, 23 bp, synthetic construct
  misc_feature 1..23: note = Synthetic Polynucleotide
  source 1..23: mol_type = other DNA
tgtggyggccatggcctatgagg

SEQ ID NO: 2530 - DNA, 23 bp, synthetic construct
  misc_feature 1..23: note = Synthetic Polynucleotide
  source 1..23: mol_type = other DNA
ctacyggaccgactctgtcctgg

SEQ ID NO: 2531 - DNA, 23 bp, synthetic construct
  misc_feature 1..23: note = Synthetic Polynucleotide
  source 1..23: mol_type = other DNA
tacyggaccgactctgtcctggg

SEQ ID NO: 2532 - DNA, 23 bp, synthetic construct
  misc_feature 1..23: note = Synthetic Polynucleotide
  source 1..23: mol_type = other DNA
tgagtytgagagccggctggcgg

SEQ ID NO: 2533 - DNA, 23 bp, synthetic construct
  misc_feature 1..23: note = Synthetic Polynucleotide
  source 1..23: mol_type = other DNA
caagaytggggacttcgggctgg

SEQ ID NO: 2534 - DNA, 23 bp, synthetic construct
  misc_feature 1..23: note = Synthetic Polynucleotide
  source 1..23: mol_type = other DNA
ggcgcttycggggggcctcaggg

SEQ ID NO: 2535 - DNA, 23 bp, synthetic construct
  misc_feature 1..23: note = Synthetic Polynucleotide
  source 1..23: mol_type = other DNA
tccaggygcgggcgtcatgctgg

SEQ ID NO: 2536 - DNA, 23 bp, synthetic construct
  misc_feature 1..23: note = Synthetic Polynucleotide
  source 1..23: mol_type = other DNA
ccaggygcgggcgtcatgctggg

SEQ ID NO: 2537 - DNA, 23 bp, synthetic construct
  misc_feature 1..23: note = Synthetic Polynucleotide
  source 1..23: mol_type = other DNA
aaggyaccgcgggcctcgcgcgg

SEQ ID NO: 2538 - DNA, 23 bp, synthetic construct
  misc_feature 1..23: note = Synthetic Polynucleotide
  source 1..23: mol_type = other DNA
aggyaccgcgggcctcgcgcggg

SEQ ID NO: 2539 - DNA, 23 bp, synthetic construct
  misc_feature 1..23: note = Synthetic Polynucleotide
  source 1..23: mol_type = other DNA
ttgcaycattggccgcacactgg

SEQ ID NO: 2540 - DNA, 51 bp, synthetic construct
  misc_feature 1..51: note = Synthetic Polynucleotide
  source 1..51: mol_type = other DNA
ctgaagccgcgccctctgcagatcaytggggtggatcccgaagggtccatc

SEQ ID NO: 2541 - DNA, 51 bp, synthetic construct
  misc_feature 1..51: note = Synthetic Polynucleotide
  source 1..51: mol_type = other DNA
tgttgaagatcggatgtccgtaataygggaaaaaggcgtggtgggtttcac

SEQ ID NO: 2542 - DNA, 51 bp, synthetic construct
  misc_feature 1..51: note = Synthetic Polynucleotide
  source 1..51: mol_type = other DNA
tccagaattctttggggctgttataygtgccaatgtgactggaagttacgg

SEQ ID NO: 2543 - DNA, 51 bp, synthetic construct
  misc_feature 1..51: note = Synthetic Polynucleotide
  source 1..51: mol_type = other DNA
gaaagatggtgttgactttgggaagyggcgtgctgtgctgaggattgccga

SEQ ID NO: 2544 - DNA, 51 bp, synthetic construct
  misc_feature 1..51: note = Synthetic Polynucleotide
  source 1..51: mol_type = other DNA
gcagacacagctcacgctgcagtggygagactcgcccgcagggtacactga

SEQ ID NO: 2545 - DNA, 51 bp, synthetic construct
  misc_feature 1..51: note = Synthetic Polynucleotide
  source 1..51: mol_type = other DNA
agaacgttttgtcacttatgttggahgtgcctttgctctgaaggtaagttt

SEQ ID NO: 2546 - DNA, 51 bp, synthetic construct
  misc_feature 1..51: note = Synthetic Polynucleotide
  source 1..51: mol_type = other DNA
aagcagtttttgacaaatagagtgcyaaaagacccaaaacaaaggcggttt

SEQ ID NO: 2547 - DNA, 51 bp, synthetic construct
  misc_feature 1..51: note = Synthetic Polynucleotide
  source 1..51: mol_type = other DNA
tgcctgctgctcaacctctgtgagayggcccacctgggcttgggcagcgcg

SEQ ID NO: 2548 - DNA, 51 bp, synthetic construct
  misc_feature 1..51: note = Synthetic Polynucleotide
  source 1..51: mol_type = other DNA
cggtttattgggccaagcccagaagbggtccgcaagatgggagacaaggtg

SEQ ID NO: 2549 - DNA, 51 bp, synthetic construct
  misc_feature 1..51: note = Synthetic Polynucleotide
  source 1..51: mol_type = other DNA
tccaaggtagagcagcttgacaagayggtgacagaaaaggcaggatttaag

SEQ ID NO: 2550 - DNA, 51 bp, synthetic construct
  misc_feature 1..51: note = Synthetic Polynucleotide
  source 1..51: mol_type = other DNA
tctctcaggtgacagtggggccgggygttggtctgtctctggaagacacca

SEQ ID NO: 2551 - DNA, 51 bp, synthetic construct
  misc_feature 1..51: note = Synthetic Polynucleotide
  source 1..51: mol_type = other DNA
tacgactggattagtatcccactggygtatacacaggtgaggactaggctg

SEQ ID NO: 2552 - DNA, 51 bp, synthetic construct
  misc_feature 1..51: note = Synthetic Polynucleotide
  source 1..51: mol_type = other DNA
ctcaatgttacaccactggcaagaayagtaggtaaggccaggcgaggtggc

SEQ ID NO: 2553 - DNA, 51 bp, synthetic construct
  misc_feature 1..51: note = Synthetic Polynucleotide
  source 1..51: mol_type = other DNA
cgggccctgaccaccgtcacagcacytgtgaggaagttcctggggccagtg

SEQ ID NO: 2554 - DNA, 51 bp, synthetic construct
  misc_feature 1..51: note = Synthetic Polynucleotide
  source 1..51: mol_type = other DNA
acaaatctgacgaggaaaactgcggyatgggcggggccagggtgggggcgg

SEQ ID NO: 2555 - DNA, 51 bp, synthetic construct
  misc_feature 1..51: note = Synthetic Polynucleotide
  source 1..51: mol_type = other DNA
aagaactgtgataaatttgggattgytgttcatgaattgggtcatgtgata

SEQ ID NO: 2556 - DNA, 51 bp, synthetic construct
  misc_feature 1..51: note = Synthetic Polynucleotide
  source 1..51: mol_type = other DNA
cctgcagcggcccggacccgagaggygagaagagggaagcggaccagggaa

SEQ ID NO: 2557 - DNA, 51 bp, synthetic construct
  misc_feature 1..51: note = Synthetic Polynucleotide
  source 1..51: mol_type = other DNA
catctaccaccagacctgggccagayactttgtgaagtaagggatcagcaa

SEQ ID NO: 2558 - DNA, 51 bp, synthetic construct
  misc_feature 1..51: note = Synthetic Polynucleotide
  source 1..51: mol_type = other DNA
ccaccagtccattcgtcagcccagaytgtcagcaaacacctggtaagtgct

SEQ ID NO: 2559 - DNA, 51 bp, synthetic construct
  misc_feature 1..51: note = Synthetic Polynucleotide
  source 1..51: mol_type = other DNA
tgctatgcagctatgaaaaagaaaayctacgccatgggtggaggctcctac

SEQ ID NO: 2560 - DNA, 51 bp, synthetic construct
  misc_feature 1..51: note = Synthetic Polynucleotide
  source 1..51: mol_type = other DNA
gctgtcaaggaggatgcagtcgagaygctggccagctacgggctggcgtac

SEQ ID NO: 2561 - DNA, 51 bp, synthetic construct
  misc_feature 1..51: note = Synthetic Polynucleotide
  source 1..51: mol_type = other DNA
ttgcttgcatttctgtttccagacaytgatgaatgtcgctatggttactgc

SEQ ID NO: 2562 - DNA, 51 bp, synthetic construct
  misc_feature 1..51: note = Synthetic Polynucleotide
  source 1..51: mol_type = other DNA
gcacctctggatgacctgaaagatayggcttctaaaccgaaggagtctcat

SEQ ID NO: 2563 - DNA, 51 bp, synthetic construct
  misc_feature 1..51: note = Synthetic Polynucleotide
  source 1..51: mol_type = other DNA
aatagcaacagtggcccaaatgagaytggaaattttggccgtggaggtaag

SEQ ID NO: 2564 - DNA, 51 bp, synthetic construct
  misc_feature 1..51: note = Synthetic Polynucleotide
  source 1..51: mol_type = other DNA
caaatttgacagccaggaagatctgyggaccaaaatcattctggctcggga

SEQ ID NO: 2565 - DNA, 51 bp, synthetic construct
  misc_feature 1..51: note = Synthetic Polynucleotide
  source 1..51: mol_type = other DNA
ctggcatattccaggtgcatccaggygcgggcgtcatgctgggcttgggtc

SEQ ID NO: 2566 - DNA, 51 bp, synthetic construct
  misc_feature 1..51: note = Synthetic Polynucleotide
  source 1..51: mol_type = other DNA
ccaagacatcaagccttgcgtgatgygaggctgccgccgcaggccctcctg

SEQ ID NO: 2567 - DNA, 51 bp, synthetic construct
  misc_feature 1..51: note = Synthetic Polynucleotide
  source 1..51: mol_type = other DNA
cctcgaccgcataggccagttcaccygtatctgtatggcaggtgggtggtg

SEQ ID NO: 2568 - DNA, 51 bp, synthetic construct
  misc_feature 1..51: note = Synthetic Polynucleotide
  source 1..51: mol_type = other DNA
cttgacgataacaccttagatgtcaygaaaaagccaagatgcggggttcct

SEQ ID NO: 2569 - DNA, 51 bp, synthetic construct
  misc_feature 1..51: note = Synthetic Polynucleotide
  source 1..51: mol_type = other DNA
gatgacctcaggaatgtcaagaagcyaggtggcgacctgctccgggccctc

SEQ ID NO: 2570 - DNA, 51 bp, synthetic construct
  misc_feature 1..51: note = Synthetic Polynucleotide
  source 1..51: mol_type = other DNA
caaaatcaagaagatgctgcctgtgygtcccccaggggcaggggggctgcc

SEQ ID NO: 2571 - DNA, 51 bp, synthetic construct
  misc_feature 1..51: note = Synthetic Polynucleotide
  source 1..51: mol_type = other DNA
aaaggataacagctatccattggtcytaggccccaaaaattttggtgcaac

SEQ ID NO: 2572 - DNA, 51 bp, synthetic construct
  misc_feature 1..51: note = Synthetic Polynucleotide
  source 1..51: mol_type = other DNA
aaatatgtctgataaaagagttactytgatagagtaaataataggagctta

SEQ ID NO: 2573 - DNA, 51 bp, synthetic construct
  misc_feature 1..51: note = Synthetic Polynucleotide
  source 1..51: mol_type = other DNA
aatatgtctgataaaagagttacttygatagagtaaataataggagcttaa

SEQ ID NO: 2574 - DNA, 51 bp, synthetic construct
  misc_feature 1..51: note = Synthetic Polynucleotide
  source 1..51: mol_type = other DNA
gcttaccgaacgaaaaattctaggcyatatacaactacgcaaaggccccaa

SEQ ID NO: 2575 - DNA, 51 bp, synthetic construct
  misc_feature 1..51: note = Synthetic Polynucleotide
  source 1..51: mol_type = other DNA
atctcagccaagcttgttgcaaataygctatctgtagcaggtgcagatcat

SEQ ID NO: 2576 - DNA, 51 bp, synthetic construct
  misc_feature 1..51: note = Synthetic Polynucleotide
  source 1..51: mol_type = other DNA
agagcagaagttgaagataatatcayggtgagttaaggacagtggaattac

SEQ ID NO: 2577 - DNA, 51 bp, synthetic construct
  misc_feature 1..51: note = Synthetic Polynucleotide
  source 1..51: mol_type = other DNA
cctttcaatatatgtaattaacagayaatgtcagacaagaggaatgtcatc

SEQ ID NO: 2578 - DNA, 51 bp, synthetic construct
  misc_feature 1..51: note = Synthetic Polynucleotide
  source 1..51: mol_type = other DNA
tgtgcaatgaaaggcaaatatggaayatataccaaggtatcccggtatgtc

SEQ ID NO: 2579 - DNA, 51 bp, synthetic construct
  misc_feature 1..51: note = Synthetic Polynucleotide
  source 1..51: mol_type = other DNA
ttatttcattctttttctcagttagygattggcaactttggcctcagctgg

SEQ ID NO: 2580 - DNA, 51 bp, synthetic construct
  misc_feature 1..51: note = Synthetic Polynucleotide
  source 1..51: mol_type = other DNA
ctcccacttcttcagcttgggcaagygtgtgcctgtgtgccgaggtgagct

SEQ ID NO: 2581 - DNA, 51 bp, synthetic construct
  misc_feature 1..51: note = Synthetic Polynucleotide
  source 1..51: mol_type = other DNA
ggtgaactccagaaagaagaagctayggccgcagtgattctggagagcatc

SEQ ID NO: 2582 - DNA, 51 bp, synthetic construct
  misc_feature 1..51: note = Synthetic Polynucleotide
  source 1..51: mol_type = other DNA
aaggacctgaccttcttgaaggagcyggggactggacaatttggggtagtg

SEQ ID NO: 2583 - DNA, 51 bp, synthetic construct
  misc_feature 1..51: note = Synthetic Polynucleotide
  source 1..51: mol_type = other DNA
caagttcagcagcaaatctgacattygggcttttggtaagtggataagatt

SEQ ID NO: 2584 - DNA, 51 bp, synthetic construct
  misc_feature 1..51: note = Synthetic Polynucleotide
  source 1..51: mol_type = other DNA
gattcatccccaccctctgacagagytcctccacaacatggactacttcaa

SEQ ID NO: 2585 - DNA, 51 bp, synthetic construct
  misc_feature 1..51: note = Synthetic Polynucleotide
  source 1..51: mol_type = other DNA
tgagctcgtgtgcacagccccacagygggtccctgtctcctgggtctatta

SEQ ID NO: 2586 - DNA, 51 bp, synthetic construct
  misc_feature 1..51: note = Synthetic Polynucleotide
  source 1..51: mol_type = other DNA
gacacatccctggaccctaatgattbtgacttcacggtaactgggagaggg

SEQ ID NO: 2587 - DNA, 51 bp, synthetic construct
  misc_feature 1..51: note = Synthetic Polynucleotide
  source 1..51: mol_type = other DNA
atcgtggcccccctcctgacctcaayagatgccatctccctggagtgtgag

SEQ ID NO: 2588 - DNA, 51 bp, synthetic construct
  misc_feature 1..51: note = Synthetic Polynucleotide
  source 1..51: mol_type = other DNA
tgaacacggagcacaacatcatattyacaggcttgtaaaggactgaacatg

SEQ ID NO: 2589 - DNA, 51 bp, synthetic construct
  misc_feature 1..51: note = Synthetic Polynucleotide
  source 1..51: mol_type = other DNA
cgagattcagaagaatattgatggtygggagggaaaagacattggacagtg

SEQ ID NO: 2590 - DNA, 51 bp, synthetic construct
  misc_feature 1..51: note = Synthetic Polynucleotide
  source 1..51: mol_type = other DNA
tgtggaagaaggcagaggaaaacaayggtggaacctgagaaggacgtgttt

SEQ ID NO: 2591 - DNA, 51 bp, synthetic construct
  misc_feature 1..51: note = Synthetic Polynucleotide
  source 1..51: mol_type = other DNA
tgtaacttttgaggacgctggggaayatacgtgcttggcgggtaattctat

SEQ ID NO: 2592 - DNA, 51 bp, synthetic construct
  misc_feature 1..51: note = Synthetic Polynucleotide
  source 1..51: mol_type = other DNA
ggccaccaaggactgccccagcccaygtacctgccgcgccctggaaaccat

SEQ ID NO: 2593 - DNA, 51 bp, synthetic construct
  misc_feature 1..51: note = Synthetic Polynucleotide
  source 1..51: mol_type = other DNA
ctgggaaagcagctggctaagaaaabagagcctgagcttgatggcagtgct

SEQ ID NO: 2594 - DNA, 51 bp, synthetic construct
  misc_feature 1..51: note = Synthetic Polynucleotide
  source 1..51: mol_type = other DNA
agttatgattgtcatgttggcaattygttttcttacaaaatcggatgggaa

SEQ ID NO: 2595 - DNA, 51 bp, synthetic construct
  misc_feature 1..51: note = Synthetic Polynucleotide
  source 1..51: mol_type = other DNA
cccatgtatgaagtacagtggaaggntgttgaggagataaatggaaacaat

SEQ ID NO: 2596 - DNA, 51 bp, synthetic construct
  misc_feature 1..51: note = Synthetic Polynucleotide
  source 1..51: mol_type = other DNA
agtccaagtgtggctcaaaggataayatcaaacacgtcccgggaggcggca

SEQ ID NO: 2597 - DNA, 51 bp, synthetic construct
  misc_feature 1..51: note = Synthetic Polynucleotide
  source 1..51: mol_type = other DNA
gagatccacgcctaccgcaagctctyggagggcgaggaggagaggtgggct

SEQ ID NO: 2598 - DNA, 51 bp, synthetic construct
  misc_feature 1..51: note = Synthetic Polynucleotide
  source 1..51: mol_type = other DNA
gccaccatgtctcgccagtcaagtgygtccttccggagcgggggcagtcgt

SEQ ID NO: 2599 - DNA, 51 bp, synthetic construct
  misc_feature 1..51: note = Synthetic Polynucleotide
  source 1..51: mol_type = other DNA
gttgtctacccatggacccagaggtyctttgacagctttggcaacctgtcc

SEQ ID NO: 2600 - DNA, 51 bp, synthetic construct
  misc_feature 1..51: note = Synthetic Polynucleotide
  source 1..51: mol_type = other DNA
aggaaacacaacagaaatccgtgagyggatgccttctccccaggcggggat

SEQ ID NO: 2601 - DNA, 51 bp, synthetic construct
  misc_feature 1..51: note = Synthetic Polynucleotide
  source 1..51: mol_type = other DNA
tccttggtactttgcaggcagaccaygtggaccctggtgagctgggtggcc

SEQ ID NO: 2602 - DNA, 51 bp, synthetic construct
  misc_feature 1..51: note = Synthetic Polynucleotide
  source 1..51: mol_type = other DNA
aggtataagaagagatttcataagtytgatgcagaccagaaaggctttatt

SEQ ID NO: 2603 - DNA, 51 bp, synthetic construct
  misc_feature 1..51: note = Synthetic Polynucleotide
  source 1..51: mol_type = other DNA
ctcaacatgttaggagggcggcaagygattgcagcagtgaaatgggcaaag

SEQ ID NO: 2604 - DNA, 51 bp, synthetic construct
  misc_feature 1..51: note = Synthetic Polynucleotide
  source 1..51: mol_type = other DNA
tatccctggagagtacaggtgcttgygttatgatggattcatggcatctga

SEQ ID NO: 2605 - DNA, 51 bp, synthetic construct
  misc_feature 1..51: note = Synthetic Polynucleotide
  source 1..51: mol_type = other DNA
atcctggacacttgcctgtatgtgayggacagagcacaaatggacctctct

SEQ ID NO: 2606 - DNA, 51 bp, synthetic construct
  misc_feature 1..51: note = Synthetic Polynucleotide
  source 1..51: mol_type = other DNA
atacaaaaagtatgagaagtctgtgyaagtaatacaactttggaagattta

SEQ ID NO: 2607 - DNA, 51 bp, synthetic construct
  misc_feature 1..51: note = Synthetic Polynucleotide
  source 1..51: mol_type = other DNA
aatatttctcatcattattgtaatayttctgatcatgttggtgatccatca

SEQ ID NO: 2608 - DNA, 51 bp, synthetic construct
  misc_feature 1..51: note = Synthetic Polynucleotide
  source 1..51: mol_type = other DNA
gtgaaggagaagatcacagcttttgyggtggagaggggcttcgggggcatt

SEQ ID NO: 2609 - DNA, 51 bp, synthetic construct
  misc_feature 1..51: note = Synthetic Polynucleotide
  source 1..51: mol_type = other DNA
gctggggtagaggtcctgaaccaggrggatgagggcaagcaggtcggccgg

SEQ ID NO: 2610 - DNA, 51 bp, synthetic construct
  misc_feature 1..51: note = Synthetic Polynucleotide
  source 1..51: mol_type = other DNA
accttcatgctgctcttcgtcctggbgtgtgagattgcagagggcatcctg

SEQ ID NO: 2611 - DNA, 51 bp, synthetic construct
  misc_feature 1..51: note = Synthetic Polynucleotide
  source 1..51: mol_type = other DNA
ggcagcagcctgagagatggctcgcyggagctcatggtgagtgggtcagag

SEQ ID NO: 2612 - DNA, 51 bp, synthetic construct
  misc_feature 1..51: note = Synthetic Polynucleotide
  source 1..51: mol_type = other DNA
ctccagtgaccgaacaattaaagaayatgcccaaaacatctggaacgtgga

SEQ ID NO: 2613 - DNA, 51 bp, synthetic construct
  misc_feature 1..51: note = Synthetic Polynucleotide
  source 1..51: mol_type = other DNA
cttttcctttaccagatgtgcagtaygtgaagctccagctgtggtgatcgc

SEQ ID NO: 2614 - DNA, 51 bp, synthetic construct
  misc_feature 1..51: note = Synthetic Polynucleotide
  source 1..51: mol_type = other DNA
tgagatccgggctgttgttgatgcabgggcctcagtcacagaggagctggg

SEQ ID NO: 2615 - DNA, 51 bp, synthetic construct
  misc_feature 1..51: note = Synthetic Polynucleotide
  source 1..51: mol_type = other DNA
gcatgggcctcagtcacagaggagcygggtgcccagtacccttgggtgcag

SEQ ID NO: 2616 - DNA, 51 bp, synthetic construct
  misc_feature 1..51: note = Synthetic Polynucleotide
  source 1..51: mol_type = other DNA
agaggagctgggtgcccagtaccctygggtgcaggtttgtgaggtcgcccc

SEQ ID NO: 2617 - DNA, 51 bp, synthetic construct
  misc_feature 1..51: note = Synthetic Polynucleotide
  source 1..51: mol_type = other DNA
gagctccgtatccctatctgatagahctttgaaaacaaaggtgccatgatg

SEQ ID NO: 2618 - DNA, 51 bp, synthetic construct
  misc_feature 1..51: note = Synthetic Polynucleotide
  source 1..51: mol_type = other DNA
caggaacttcacaacttattggaggyaataactttgtaagtggaacttact

SEQ ID NO: 2619 - DNA, 51 bp, synthetic construct
  misc_feature 1..51: note = Synthetic Polynucleotide
  source 1..51: mol_type = other DNA
ttgaccaatggtcatgtggccaagaytggggacttcgggctggctagggac

SEQ ID NO: 2620 - DNA, 51 bp, synthetic construct
  misc_feature 1..51: note = Synthetic Polynucleotide
  source 1..51: mol_type = other DNA
ctccacattccaactatgtaaaatabgtgctgaaaatgataaggatgtaaa

SEQ ID NO: 2621 - DNA, 51 bp, synthetic construct
  misc_feature 1..51: note = Synthetic Polynucleotide
  source 1..51: mol_type = other DNA
gtgtttgaagagttttgtcgggagaytggtgtgcgcaacatccgggagttt

SEQ ID NO: 2622 - DNA, 51 bp, synthetic construct
  misc_feature 1..51: note = Synthetic Polynucleotide
  source 1..51: mol_type = other DNA
tggtgtaatggagtgatagtacgttdgtggaaagatgaagaatggacattc

SEQ ID NO: 2623 - DNA, 51 bp, synthetic construct
  misc_feature 1..51: note = Synthetic Polynucleotide
  source 1..51: mol_type = other DNA
ccccagcgttttgggtgctccggggrtgacaccagtaagggttcagcagtg

SEQ ID NO: 2624 - DNA, 51 bp, synthetic construct
  misc_feature 1..51: note = Synthetic Polynucleotide
  source 1..51: mol_type = other DNA
ccaataattttcaaggaagaaaatcytagggtaaggtgacttaggttttat

SEQ ID NO: 2625 - DNA, 51 bp, synthetic construct
  misc_feature 1..51: note = Synthetic Polynucleotide
  source 1..51: mol_type = other DNA
cccattcttccatttgctccgcagcyggtattccctctcgagtggtttcca

SEQ ID NO: 2626 - DNA, 51 bp, synthetic construct
  misc_feature 1..51: note = Synthetic Polynucleotide
  source 1..51: mol_type = other DNA
gtagtcctcaaggtttataagaatgwgagtcatggagcaacaggtcctctt

SEQ ID NO: 2627 - DNA, 51 bp, synthetic construct
  misc_feature 1..51: note = Synthetic Polynucleotide
  source 1..51: mol_type = other DNA
gcttaccgcccccctcccttccagaytgtggatccgctggcccggggccgg

SEQ ID NO: 2628 - DNA, 51 bp, synthetic construct
  misc_feature 1..51: note = Synthetic Polynucleotide
  source 1..51: mol_type = other DNA
gaaaatgaaggaactgaagaaaattygcaagtatgtcttagggttcagtaa

SEQ ID NO: 2629 - DNA, 51 bp, synthetic construct
  misc_feature 1..51: note = Synthetic Polynucleotide
  source 1..51: mol_type = other DNA
gccagtgatgacaagactgttaagcygtgggacaagagcagccgggaatgt

SEQ ID NO: 2630 - DNA, 51 bp, synthetic construct
  misc_feature 1..51: note = Synthetic Polynucleotide
  source 1..51: mol_type = other DNA
acacttaatgattgttggcaagaaaygtgctgctgatctgggcctgaataa

SEQ ID NO: 2631 - DNA, 51 bp, synthetic construct
  misc_feature 1..51: note = Synthetic Polynucleotide
  source 1..51: mol_type = other DNA
tttcctggtttacagggtcctccagyaagttataaaatttgggattatgat

SEQ ID NO: 2632 - DNA, 51 bp, synthetic construct
  misc_feature 1..51: note = Synthetic Polynucleotide
  source 1..51: mol_type = other DNA
aacctgtgttgtggtttacactggayatggaaatagagaggagcaaaatct

SEQ ID NO: 2633 - DNA, 51 bp, synthetic construct
  misc_feature 1..51: note = Synthetic Polynucleotide
  source 1..51: mol_type = other DNA
ttagttgttacttcttcacacaagayggcggctcccagggaggaggcatga

SEQ ID NO: 2634 - DNA, 51 bp, synthetic construct
  misc_feature 1..51: note = Synthetic Polynucleotide
  source 1..51: mol_type = other DNA
gtggcatcacactcctcaagccaggyatcccgggggtaggtgggccaggct

SEQ ID NO: 2635 - DNA, 51 bp, synthetic construct
  misc_feature 1..51: note = Synthetic Polynucleotide
  source 1..51: mol_type = other DNA
tatgaggaactcccaggcactgataycaggtgagagccagggtccgggcag

SEQ ID NO: 2636 - DNA, 51 bp, synthetic construct
  misc_feature 1..51: note = Synthetic Polynucleotide
  source 1..51: mol_type = other DNA
gtagttgatgctgatgtaacagttayaggttctggtcctggaggatatgtt

SEQ ID NO: 2637 - DNA, 51 bp, synthetic construct
  misc_feature 1..51: note = Synthetic Polynucleotide
  source 1..51: mol_type = other DNA
ggacaaagaattggatctggatcatytggaacagtctacaagggaaagtgg

SEQ ID NO: 2638 - DNA, 51 bp, synthetic construct
  misc_feature 1..51: note = Synthetic Polynucleotide
  source 1..51: mol_type = other DNA
caggaggagtcccaggccgcccgcaygatccacagcaccaatggcctatac

SEQ ID NO: 2639 - DNA, 51 bp, synthetic construct
  misc_feature 1..51: note = Synthetic Polynucleotide
  source 1..51: mol_type = other DNA
gtagcacggagctctttgtgaaaggygggcctgggacctgaggatgtggga

SEQ ID NO: 2640 - DNA, 51 bp, synthetic construct
  misc_feature 1..51: note = Synthetic Polynucleotide
  source 1..51: mol_type = other DNA
cctcctatcagccttccgccgcacgygagtggccatcctcagggcctgggg

SEQ ID NO: 2641 - DNA, 51 bp, synthetic construct
  misc_feature 1..51: note = Synthetic Polynucleotide
  source 1..51: mol_type = other DNA
aagagtgcagaaagagagaaggagayggcctccatgaaggaggagttcaca

SEQ ID NO: 2642 - DNA, 51 bp, synthetic construct
  misc_feature 1..51: note = Synthetic Polynucleotide
  source 1..51: mol_type = other DNA
cgacacaacaagccagccatatagaygcctctgctcccaggagagcttcac

SEQ ID NO: 2643 - DNA, 51 bp, synthetic construct
  misc_feature 1..51: note = Synthetic Polynucleotide
  source 1..51: mol_type = other DNA
tagataaattcaaattagacttaggyaagtaatgcaatatggtagactggg

SEQ ID NO: 2644 - DNA, 51 bp, synthetic construct
  misc_feature 1..51: note = Synthetic Polynucleotide
  source 1..51: mol_type = other DNA
ctcttcttccagatcttcagggggcyagaaatctgttgctatgggcccttc

SEQ ID NO: 2645 - DNA, 51 bp, synthetic construct
  misc_feature 1..51: note = Synthetic Polynucleotide
  source 1..51: mol_type = other DNA
agcttctgggggaaagctcatcttcyatgatcttcgaggagagggggtgaa

SEQ ID NO: 2646 - DNA, 51 bp, synthetic construct
  misc_feature 1..51: note = Synthetic Polynucleotide
  source 1..51: mol_type = other DNA
cgggcccctctcagcaggctgtgtgygccagggctgtggggcagaggacgt

SEQ ID NO: 2647 - DNA, 51 bp, synthetic construct
  misc_feature 1..51: note = Synthetic Polynucleotide
  source 1..51: mol_type = other DNA
gagatcgccacctaccgcaagctgcbggagggtgaggagtgcaggtgggta

SEQ ID NO: 2648 - DNA, 51 bp, synthetic construct
  misc_feature 1..51: note = Synthetic Polynucleotide
  source 1..51: mol_type = other DNA
ctggtccgccggctgccgcagcaagbacgtgggcctctgggggcggctgcg

SEQ ID NO: 2649 - DNA, 51 bp, synthetic construct
  misc_feature 1..51: note = Synthetic Polynucleotide
  source 1..51: mol_type = other DNA
gagatggacgccctgaagatccagahggaggagaagttcatggcagccaac

SEQ ID NO: 2650 - DNA, 51 bp, synthetic construct
  misc_feature 1..51: note = Synthetic Polynucleotide
  source 1..51: mol_type = other DNA
tgttgtgttcctgtcttacagacttytatagtattgaataaagggaaggcc

SEQ ID NO: 2651 - DNA, 51 bp, synthetic construct
  misc_feature 1..51: note = Synthetic Polynucleotide
  source 1..51: mol_type = other DNA
tgtgttcctgtcttacagacttttayagtattgaataaagggaaggccatc

SEQ ID NO: 2652 - DNA, 51 bp, synthetic construct
  misc_feature 1..51: note = Synthetic Polynucleotide
  source 1..51: mol_type = other DNA
ggagtcagggttgctgggttgaggargagggcttctagggagggggccttg

SEQ ID NO: 2653 - DNA, 51 bp, synthetic construct
  misc_feature 1..51: note = Synthetic Polynucleotide
  source 1..51: mol_type = other DNA
aacagatgttccacatcattactggyaaaaaacctggtttttgggctttgt

SEQ ID NO: 2654 - DNA, 51 bp, synthetic construct
  misc_feature 1..51: note = Synthetic Polynucleotide
  source 1..51: mol_type = other DNA
cctcatccagattggaccaaaggaaygtgttttacccggaggagagactgc

SEQ ID NO: 2655 - DNA, 51 bp, synthetic construct
  misc_feature 1..51: note = Synthetic Polynucleotide
  source 1..51: mol_type = other DNA
ttcaccgctccattggtcttgagccragtgggtgatgtccaggggctggca

SEQ ID NO: 2656 - DNA, 51 bp, synthetic construct
  misc_feature 1..51: note = Synthetic Polynucleotide
  source 1..51: mol_type = other DNA
gaggtcagctttgcggggaaaatggyaaggagcaagggagcaggagggttc

SEQ ID NO: 2657 - DNA, 51 bp, synthetic construct
  misc_feature 1..51: note = Synthetic Polynucleotide
  source 1..51: mol_type = other DNA
acccgcatccaggatctctacactgygagtaagctggaagtggattgcctc

SEQ ID NO: 2658 - DNA, 51 bp, synthetic construct
  misc_feature 1..51: note = Synthetic Polynucleotide
  source 1..51: mol_type = other DNA
acaagggctggaactggacttcaggygagggctggggtgggcaggaatgga

SEQ ID NO: 2659 - DNA, 51 bp, synthetic construct
  misc_feature 1..51: note = Synthetic Polynucleotide
  source 1..51: mol_type = other DNA
gacattcaggatgaaaaccagctgcyggtggccgacgtgaagcggctggga

SEQ ID NO: 2660 - DNA, 51 bp, synthetic construct
  misc_feature 1..51: note = Synthetic Polynucleotide
  source 1..51: mol_type = other DNA
ggaccccaaggagtccatcaagcagygtgagctgctcctggaggaaccaga

SEQ ID NO: 2661 - DNA, 51 bp, synthetic construct
  misc_feature 1..51: note = Synthetic Polynucleotide
  source 1..51: mol_type = other DNA
gaaaacagaaagtggacaatcatggyaagcaagaaacaaggaatggaggat

SEQ ID NO: 2662 - DNA, 51 bp, synthetic construct
  misc_feature 1..51: note = Synthetic Polynucleotide
  source 1..51: mol_type = other DNA
ctaaaaaactttaccggagaagaaabtaaatatatgctatggctatcagca

SEQ ID NO: 2663 - DNA, 51 bp, synthetic construct
  misc_feature 1..51: note = Synthetic Polynucleotide
  source 1..51: mol_type = other DNA
gagaaaagaagtactcgaacaagatygtctacagaaacaggtaagtccact

SEQ ID NO: 2664 - DNA, 51 bp, synthetic construct
  misc_feature 1..51: note = Synthetic Polynucleotide
  source 1..51: mol_type = other DNA
cgtcctttacacaattaaaagaagaygctgtttaatctgaggatcctgtta

SEQ ID NO: 2665 - DNA, 51 bp, synthetic construct
  misc_feature 1..51: note = Synthetic Polynucleotide
  source 1..51: mol_type = other DNA
ccatcctatccagatcctggctgatyacctcacgctccaggttggtttatt

SEQ ID NO: 2666 - DNA, 51 bp, synthetic construct
  misc_feature 1..51: note = Synthetic Polynucleotide
  source 1..51: mol_type = other DNA
gaagcagcgcatggaggcaatgtatyaattacagacacttggataagcatg

SEQ ID NO: 2667 - DNA, 51 bp, synthetic construct
  misc_feature 1..51: note = Synthetic Polynucleotide
  source 1..51: mol_type = other DNA
ccaccagacggaggagctcaacctgygggtgcgtggctgcagggctgccct

SEQ ID NO: 2668 - DNA, 51 bp, synthetic construct
  misc_feature 1..51: note = Synthetic Polynucleotide
  source 1..51: mol_type = other DNA
cccctcaccctgtggcaagtacatgygagtgcaggcggagcaggcagggcg

SEQ ID NO: 2669 - DNA, 51 bp, synthetic construct
  misc_feature 1..51: note = Synthetic Polynucleotide
  source 1..51: mol_type = other DNA
tttgtgttgataagctctacggtgtraagagttgcgagtgtggaacatgtc

SEQ ID NO: 2670 - DNA, 51 bp, synthetic construct
  misc_feature 1..51: note = Synthetic Polynucleotide
  source 1..51: mol_type = other DNA
aaccccaaggccaaccgcgagaagaygacccaggtgagtggcccgctacct

SEQ ID NO: 2671 - DNA, 51 bp, synthetic construct
  misc_feature 1..51: note = Synthetic Polynucleotide
  source 1..51: mol_type = other DNA
ctcgatgagaatttgaaagccatagraacagcgagcctctggaacctgcac

SEQ ID NO: 2672 - DNA, 51 bp, synthetic construct
  misc_feature 1..51: note = Synthetic Polynucleotide
  source 1..51: mol_type = other DNA
ttggttgatcctttgggtgaaatgtyggcaccatcctgggaggaacatgcc

SEQ ID NO: 2673 - DNA, 51 bp, synthetic construct
  misc_feature 1..51: note = Synthetic Polynucleotide
  source 1..51: mol_type = other DNA
gaattacaacaatcagtcttcaaatbttggacccatgaagggaggaaattt

SEQ ID NO: 2674 - DNA, 51 bp, synthetic construct
  misc_feature 1..51: note = Synthetic Polynucleotide
  source 1..51: mol_type = other DNA
ttttggacccatgaagggaggaaatyttggaggcagaagctctggccccta

SEQ ID NO: 2675 - DNA, 51 bp, synthetic construct
  misc_feature 1..51: note = Synthetic Polynucleotide
  source 1..51: mol_type = other DNA
cgcaaaatactccttcagcggagcgragaggtggcggatgactggcacgct

SEQ ID NO: 2676 - DNA, 51 bp, synthetic construct
  misc_feature 1..51: note = Synthetic Polynucleotide
  source 1..51: mol_type = other DNA
gcgcaagaggctgcggtgagccaagygagtacagcgcacctgggggggcgc

SEQ ID NO: 2677 - DNA, 51 bp, synthetic construct
  misc_feature 1..51: note = Synthetic Polynucleotide
  source 1..51: mol_type = other DNA
ataatcctatttattacctcagaagyttttttcttcgcaggatttttctga

SEQ ID NO: 2678 - DNA, 51 bp, synthetic construct
  misc_feature 1..51: note = Synthetic Polynucleotide
  source 1..51: mol_type = other DNA
cgcaggttaatccccagaggctccayggagttccctggcctggggtccctg

SEQ ID NO: 2679 - DNA, 51 bp, synthetic construct
  misc_feature 1..51: note = Synthetic Polynucleotide
  source 1..51: mol_type = other DNA
gagaaattctccaacaacaacgaggyattgccagcagtgcaggcggcccct

SEQ ID NO: 2680 - DNA, 51 bp, synthetic construct
  misc_feature 1..51: note = Synthetic Polynucleotide
  source 1..51: mol_type = other DNA
gggctctactcagtcttcttcttcaytgtggtcattttcctgggctccttc

SEQ ID NO: 2681 - DNA, 51 bp, synthetic construct
  misc_feature 1..51: note = Synthetic Polynucleotide
  source 1..51: mol_type = other DNA
taatgaataggttttgatggcacttyatttgactactttaatggttatgaa

SEQ ID NO: 2682 - DNA, 51 bp, synthetic construct
  misc_feature 1..51: note = Synthetic Polynucleotide
  source 1..51: mol_type = other DNA
aggtctctgaggttccaccaaaatayggaacttgattttggacactttgac

SEQ ID NO: 2683 - DNA, 51 bp, synthetic construct
  misc_feature 1..51: note = Synthetic Polynucleotide
  source 1..51: mol_type = other DNA
tggacatcttttaaccaggagagaaytgttgatgttgctggaccagggggt

SEQ ID NO: 2684 - DNA, 51 bp, synthetic construct
  misc_feature 1..51: note = Synthetic Polynucleotide
  source 1..51: mol_type = other DNA
attgacaatgggaagcagcgtgagtytgagagccggctggcggatgcgctg

SEQ ID NO: 2685 - DNA, 51 bp, synthetic construct
  misc_feature 1..51: note = Synthetic Polynucleotide
  source 1..51: mol_type = other DNA
cagaaagccgacaagaagaccatggbgagcccagggtctggggtccccacg

SEQ ID NO: 2686 - DNA, 51 bp, synthetic construct
  misc_feature 1..51: note = Synthetic Polynucleotide
  source 1..51: mol_type = other DNA
agcgggggctatgtcttccagaaggygtggtagggaggcacggggtgcccc

SEQ ID NO: 2687 - DNA, 51 bp, synthetic construct
  misc_feature 1..51: note = Synthetic Polynucleotide
  source 1..51: mol_type = other DNA
aacccctggacggccgggatcattgygagtgtattataaggggctttgtgg

SEQ ID NO: 2688 - DNA, 51 bp, synthetic construct
  misc_feature 1..51: note = Synthetic Polynucleotide
  source 1..51: mol_type = other DNA
cttcctggttggggccaatggcattygggggcagcgagccgtggacatcgg

SEQ ID NO: 2689 - DNA, 51 bp, synthetic construct
  misc_feature 1..51: note = Synthetic Polynucleotide
  source 1..51: mol_type = other DNA
actcggcagaggctggtgctggagaytggggacccagaaggtacctctagc

SEQ ID NO: 2690 - DNA, 51 bp, synthetic construct
  misc_feature 1..51: note = Synthetic Polynucleotide
  source 1..51: mol_type = other DNA
gagaagcacctggatattcctaaaaygttggatgctgaaggtgagatgaaa

SEQ ID NO: 2691 - DNA, 51 bp, synthetic construct
  misc_feature 1..51: note = Synthetic Polynucleotide
  source 1..51: mol_type = other DNA
attccatccatcatgaatgtgcttcyggtttgtcttatattctggctaatt

SEQ ID NO: 2692 - DNA, 51 bp, synthetic construct
  misc_feature 1..51: note = Synthetic Polynucleotide
  source 1..51: mol_type = other DNA
ctaataaatttgatcctggctgtgghggccatggcctacgaggaacagaat

SEQ ID NO: 2693 - DNA, 51 bp, synthetic construct
  misc_feature 1..51: note = Synthetic Polynucleotide
  source 1..51: mol_type = other DNA
gcagaatcagaaccagctcttttgayagggagcaagcagttcgggctttca

SEQ ID NO: 2694 - DNA, 51 bp, synthetic construct
  misc_feature 1..51: note = Synthetic Polynucleotide
  source 1..51: mol_type = other DNA
tcccggaagctggcggagcaggagcygattgagactagtgagcgggtgcag

SEQ ID NO: 2695 - DNA, 51 bp, synthetic construct
  misc_feature 1..51: note = Synthetic Polynucleotide
  source 1..51: mol_type = other DNA
tctgactcccaggacgggcaccaggkgagtcacctagtaggggcggcggcg

SEQ ID NO: 2696 - DNA, 51 bp, synthetic construct
  misc_feature 1..51: note = Synthetic Polynucleotide
  source 1..51: mol_type = other DNA
tccaggggacccaagggctacaaggygagcgtgggctgctgggagggggga

SEQ ID NO: 2697 - DNA, 51 bp, synthetic construct
  misc_feature 1..51: note = Synthetic Polynucleotide
  source 1..51: mol_type = other DNA
ctgcgtcatgctcattggctgtgagygtgcccaggggcgggcggcggggag

SEQ ID NO: 2698 - DNA, 51 bp, synthetic construct
  misc_feature 1..51: note = Synthetic Polynucleotide
  source 1..51: mol_type = other DNA
ctaataaatttgatcttggctgtggyggccatggcctatgaggaacagaat

SEQ ID NO: 2699 - DNA, 51 bp, synthetic construct
  misc_feature 1..51: note = Synthetic Polynucleotide
  source 1..51: mol_type = other DNA
tatgcagctgttgattcacgaaatgyaagtctagttagagggaaattgttt

SEQ ID NO: 2700 - DNA, 51 bp, synthetic construct
  misc_feature 1..51: note = Synthetic Polynucleotide
  source 1..51: mol_type = other DNA
ccccgcgaagccatcagtactttgtytgacaacaatacatgggtgaaacac

SEQ ID NO: 2701 - DNA, 51 bp, synthetic construct
  misc_feature 1..51: note = Synthetic Polynucleotide
  source 1..51: mol_type = other DNA
cattatgctctccacagtggagtgaygcttcggggctcaggcatccagtgg

SEQ ID NO: 2702 - DNA, 51 bp, synthetic construct
  misc_feature 1..51: note = Synthetic Polynucleotide
  source 1..51: mol_type = other DNA
cacacgcaaatttccttccactcggrtaagatgctgaggaggggccagacc

SEQ ID NO: 2703 - DNA, 23 bp, synthetic construct
  misc_feature 1..23: note = Synthetic Polynucleotide
  source 1..23: mol_type = other DNA
atcaytggggtggatcccgaagg

SEQ ID NO: 2704 - DNA, 23 bp, synthetic construct
  misc_feature 1..23: note = Synthetic Polynucleotide
  source 1..23: mol_type = other DNA
tcaytggggtggatcccgaaggg

SEQ ID NO: 2705 - DNA, 23 bp, synthetic construct
  misc_feature 1..23: note = Synthetic Polynucleotide
  source 1..23: mol_type = other DNA
cgtaataygggaaaaaggcgtgg

SEQ ID NO: 2706 - DNA, 23 bp, synthetic construct
  misc_feature 1..23: note = Synthetic Polynucleotide
  source 1..23: mol_type = other DNA
aataygggaaaaaggcgtggtgg

SEQ ID NO: 2707 - DNA, 23 bp, synthetic construct
  misc_feature 1..23: note = Synthetic Polynucleotide
  source 1..23: mol_type = other DNA
ataygggaaaaaggcgtggtggg

SEQ ID NO: 2708 - DNA, 23 bp, synthetic construct
  misc_feature 1..23: note = Synthetic Polynucleotide
  source 1..23: mol_type = other DNA
gttataygtgccaatgtgactgg

SEQ ID NO: 2709 - DNA, 23 bp, synthetic construct
  misc_feature 1..23: note = Synthetic Polynucleotide
  source 1..23: mol_type = other DNA
ggaagyggcgtgctgtgctgagg

SEQ ID NO: 2710 - DNA, 23 bp, synthetic construct
  misc_feature 1..23: note = Synthetic Polynucleotide
  source 1..23: mol_type = other DNA
cagtggygagactcgcccgcagg

SEQ ID NO: 2711 - DNA, 23 bp, synthetic construct
  misc_feature 1..23: note = Synthetic Polynucleotide
  source 1..23: mol_type = other DNA
agtggygagactcgcccgcaggg

SEQ ID NO: 2712 - DNA, 23 bp, synthetic construct
  misc_feature 1..23: note = Synthetic Polynucleotide
  source 1..23: mol_type = other DNA
tggahgtgcctttgctctgaagg

SEQ ID NO: 2713 - DNA, 23 bp, synthetic construct
  misc_feature 1..23: note = Synthetic Polynucleotide
  source 1..23: mol_type = other DNA
tgcyaaaagacccaaaacaaagg

SEQ ID NO: 2714 - DNA, 23 bp, synthetic construct
  misc_feature 1..23: note = Synthetic Polynucleotide
  source 1..23: mol_type = other DNA
tgagayggcccacctgggcttgg

SEQ ID NO: 2715 - DNA, 23 bp, synthetic construct
  misc_feature 1..23: note = Synthetic Polynucleotide
  source 1..23: mol_type = other DNA
ccagaagbggtccgcaagatggg

SEQ ID NO: 2716 - DNA, 23 bp, synthetic construct
  misc_feature 1..23: note = Synthetic Polynucleotide
  source 1..23: mol_type = other DNA
aagayggtgacagaaaaggcagg

SEQ ID NO: 2717 - DNA, 23 bp, synthetic construct
  misc_feature 1..23: note = Synthetic Polynucleotide
  source 1..23: mol_type = other DNA
gccgggygttggtctgtctctgg

SEQ ID NO: 2718 - DNA, 23 bp, synthetic construct
  misc_feature 1..23: note = Synthetic Polynucleotide
  source 1..23: mol_type = other DNA
cactggygtatacacaggtgagg

SEQ ID NO: 2719 - DNA, 23 bp, synthetic construct
  misc_feature 1..23: note = Synthetic Polynucleotide
  source 1..23: mol_type = other DNA
caagaayagtaggtaaggccagg

SEQ ID NO: 2720 - DNA, 23 bp, synthetic construct
  misc_feature 1..23: note = Synthetic Polynucleotide
  source 1..23: mol_type = other DNA
cacytgtgaggaagttcctgggg

SEQ ID NO: 2721 - DNA, 23 bp, synthetic construct
  misc_feature 1..23: note = Synthetic Polynucleotide
  source 1..23: mol_type = other DNA
cggyatgggcggggccagggtgg

SEQ ID NO: 2722 - DNA, 23 bp, synthetic construct
  misc_feature 1..23: note = Synthetic Polynucleotide
  source 1..23: mol_type = other DNA
gggattgytgttcatgaattggg

SEQ ID NO: 2723 - DNA, 23 bp, synthetic construct
  misc_feature 1..23: note = Synthetic Polynucleotide
  source 1..23: mol_type = other DNA
gagaggygagaagagggaagcgg

SEQ ID NO: 2724 - DNA, 23 bp, synthetic construct
  misc_feature 1..23: note = Synthetic Polynucleotide
  source 1..23: mol_type = other DNA
gccagayactttgtgaagtaagg

SEQ ID NO: 2725 - DNA, 23 bp, synthetic construct
  misc_feature 1..23: note = Synthetic Polynucleotide
  source 1..23: mol_type = other DNA
ccagaytgtcagcaaacacctgg

SEQ ID NO: 2726 - DNA, 23 bp, synthetic construct
  misc_feature 1..23: note = Synthetic Polynucleotide
  source 1..23: mol_type = other DNA
aagaaaayctacgccatgggtgg

SEQ ID NO: 2727 - DNA, 23 bp, synthetic construct
  misc_feature 1..23: note = Synthetic Polynucleotide
  source 1..23: mol_type = other DNA
gtcgagaygctggccagctacgg

SEQ ID NO: 2728 - DNA, 23 bp, synthetic construct
  misc_feature 1..23: note = Synthetic Polynucleotide
  source 1..23: mol_type = other DNA
tcgagaygctggccagctacggg

SEQ ID NO: 2729 - DNA, 22 bp, synthetic construct
  misc_feature 1..22: note = Synthetic Polynucleotide
  source 1..22: mol_type = other DNA
gacaytgatgaatgtcgctatg

SEQ ID NO: 2730 - DNA, 23 bp, synthetic construct
  misc_feature 1..23: note = Synthetic Polynucleotide
  source 1..23: mol_type = other DNA
agatayggcttctaaaccgaagg

SEQ ID NO: 2731 - DNA, 23 bp, synthetic construct
  misc_feature 1..23: note = Synthetic Polynucleotide
  source 1..23: mol_type = other DNA
gagaytggaaattttggccgtgg

SEQ ID NO: 2732 - DNA, 23 bp, synthetic construct
  misc_feature 1..23: note = Synthetic Polynucleotide
  source 1..23: mol_type = other DNA
tctgyggaccaaaatcattctgg

SEQ ID NO: 2733 - DNA, 23 bp, synthetic construct
  misc_feature 1..23: note = Synthetic Polynucleotide
  source 1..23: mol_type = other DNA
tccaggygcgggcgtcatgctgg

SEQ ID NO: 2734 - DNA, 23 bp, synthetic construct
  misc_feature 1..23: note = Synthetic Polynucleotide
  source 1..23: mol_type = other DNA
tgatgygaggctgccgccgcagg

SEQ ID NO: 2735 - DNA, 23 bp, synthetic construct
  misc_feature 1..23: note = Synthetic Polynucleotide
  source 1..23: mol_type = other DNA
accygtatctgtatggcaggtgg

SEQ ID NO: 2736 - DNA, 23 bp, synthetic construct
  misc_feature 1..23: note = Synthetic Polynucleotide
  source 1..23: mol_type = other DNA
gtcaygaaaaagccaagatgcgg

SEQ ID NO: 2737 - DNA, 23 bp, synthetic construct
  misc_feature 1..23: note = Synthetic Polynucleotide
  source 1..23: mol_type = other DNA
tcaygaaaaagccaagatgcggg

SEQ ID NO: 2738 - DNA, 23 bp, synthetic construct
  misc_feature 1..23: note = Synthetic Polynucleotide
  source 1..23: mol_type = other DNA
agcyaggtggcgacctgctccgg

SEQ ID NO: 2739 - DNA, 23 bp, synthetic construct
  misc_feature 1..23: note = Synthetic Polynucleotide
  source 1..23: mol_type = other DNA
cctgtgygtcccccaggggcagg

SEQ ID NO: 2740 - DNA, 23 bp, synthetic construct
  misc_feature 1..23: note = Synthetic Polynucleotide
  source 1..23: mol_type = other DNA
ctgtgygtcccccaggggcaggg

SEQ ID NO: 2741 - DNA, 23 bp, synthetic construct
  misc_feature 1..23: note = Synthetic Polynucleotide
  source 1..23: mol_type = other DNA
gtcytaggccccaaaaattttgg

SEQ ID NO: 2742 - DNA, 23 bp, synthetic construct
  misc_feature 1..23: note = Synthetic Polynucleotide
  source 1..23: mol_type = other DNA
actytgatagagtaaataatagg

SEQ ID NO: 2743 - DNA, 23 bp, synthetic construct
  misc_feature 1..23: note = Synthetic Polynucleotide
  source 1..23: mol_type = other DNA
acttygatagagtaaataatagg

SEQ ID NO: 2744 - DNA, 23 bp, synthetic construct
  misc_feature 1..23: note = Synthetic Polynucleotide
  source 1..23: mol_type = other DNA
ggcyatatacaactacgcaaagg

SEQ ID NO: 2745 - DNA, 23 bp, synthetic construct
  misc_feature 1..23: note = Synthetic Polynucleotide
  source 1..23: mol_type = other DNA
gcaaataygctatctgtagcagg

SEQ ID NO: 2746 - DNA, 23 bp, synthetic construct
  misc_feature 1..23: note = Synthetic Polynucleotide
  source 1..23: mol_type = other DNA
tcayggtgagttaaggacagtgg

SEQ ID NO: 2747 - DNA, 23 bp, synthetic construct
  misc_feature 1..23: note = Synthetic Polynucleotide
  source 1..23: mol_type = other DNA
aacagayaatgtcagacaagagg

SEQ ID NO: 2748 - DNA, 23 bp, synthetic construct
  misc_feature 1..23: note = Synthetic Polynucleotide
  source 1..23: mol_type = other DNA
gaayatataccaaggtatcccgg

SEQ ID NO: 2749 - DNA, 23 bp, synthetic construct
  misc_feature 1..23: note = Synthetic Polynucleotide
  source 1..23: mol_type = other DNA
cagttagygattggcaactttgg

SEQ ID NO: 2750 - DNA, 23 bp, synthetic construct
  misc_feature 1..23: note = Synthetic Polynucleotide
  source 1..23: mol_type = other DNA
aagygtgtgcctgtgtgccgagg

SEQ ID NO: 2751 - DNA, 23 bp, synthetic construct
  misc_feature 1..23: note = Synthetic Polynucleotide
  source 1..23: mol_type = other DNA
agctayggccgcagtgattctgg

SEQ ID NO: 2752 - DNA, 23 bp, synthetic construct
  misc_feature 1..23: note = Synthetic Polynucleotide
  source 1..23: mol_type = other DNA
agcyggggactggacaatttggg

SEQ ID NO: 2753 - DNA, 23 bp, synthetic construct
  misc_feature 1..23: note = Synthetic Polynucleotide
  source 1..23: mol_type = other DNA
acattygggcttttggtaagtgg

SEQ ID NO: 2754 - DNA, 23 bp, synthetic construct
  misc_feature 1..23: note = Synthetic Polynucleotide
  source 1..23: mol_type = other DNA
gacagagytcctccacaacatgg

SEQ ID NO: 2755 - DNA, 23 bp, synthetic construct
  misc_feature 1..23: note = Synthetic Polynucleotide
  source 1..23: mol_type = other DNA
cacagygggtccctgtctcctgg

SEQ ID NO: 2756 - DNA, 23 bp, synthetic construct
  misc_feature 1..23: note = Synthetic Polynucleotide
  source 1..23: mol_type = other DNA
acagygggtccctgtctcctggg

SEQ ID NO: 2757 - DNA, 23 bp, synthetic construct
  misc_feature 1..23: note = Synthetic Polynucleotide
  source 1..23: mol_type = other DNA
gattbtgacttcacggtaactgg

SEQ ID NO: 2758 - DNA, 23 bp, synthetic construct
  misc_feature 1..23: note = Synthetic Polynucleotide
  source 1..23: mol_type = other DNA
ctcaayagatgccatctccctgg

SEQ ID NO: 2759 - DNA, 23 bp, synthetic construct
  misc_feature 1..23: note = Synthetic Polynucleotide
  source 1..23: mol_type = other DNA
tcatattyacaggcttgtaaagg

SEQ ID NO: 2760 - DNA, 23 bp, synthetic construct
  misc_feature 1..23: note = Synthetic Polynucleotide
  source 1..23: mol_type = other DNA
ggtygggagggaaaagacattgg

SEQ ID NO: 2761 - DNA, 23 bp, synthetic construct
  misc_feature 1..23: note = Synthetic Polynucleotide
  source 1..23: mol_type = other DNA
aacaayggtggaacctgagaagg

SEQ ID NO: 2762 - DNA, 23 bp, synthetic construct
  misc_feature 1..23: note = Synthetic Polynucleotide
  source 1..23: mol_type = other DNA
tggggaayatacgtgcttggcgg

SEQ ID NO: 2763 - DNA, 23 bp, synthetic construct
  misc_feature 1..23: note = Synthetic Polynucleotide
  source 1..23: mol_type = other DNA
ggggaayatacgtgcttggcggg

SEQ ID NO: 2764 - DNA, 23 bp, synthetic construct
  misc_feature 1..23: note = Synthetic Polynucleotide
  source 1..23: mol_type = other DNA
cccaygtacctgccgcgccctgg

SEQ ID NO: 2765 - DNA, 23 bp, synthetic construct
  misc_feature 1..23: note = Synthetic Polynucleotide
  source 1..23: mol_type = other DNA
aaaabagagcctgagcttgatgg

SEQ ID NO: 2766 - DNA, 23 bp, synthetic construct
  misc_feature 1..23: note = Synthetic Polynucleotide
  source 1..23: mol_type = other DNA
aattygttttcttacaaaatcgg

SEQ ID NO: 2767 - DNA, 23 bp, synthetic construct
  misc_feature 1..23: note = Synthetic Polynucleotide
  source 1..23: mol_type = other DNA
aaggntgttgaggagataaatgg

SEQ ID NO: 2768 - DNA, 23 bp, synthetic construct
  misc_feature 1..23: note = Synthetic Polynucleotide
  source 1..23: mol_type = other DNA
ggataayatcaaacacgtcccgg

SEQ ID NO: 2769 - DNA, 23 bp, synthetic construct
  misc_feature 1..23: note = Synthetic Polynucleotide
  source 1..23: mol_type = other DNA
gataayatcaaacacgtcccggg

SEQ ID NO: 2770 - DNA, 23 bp, synthetic construct
  misc_feature 1..23: note = Synthetic Polynucleotide
  source 1..23: mol_type = other DNA
tctyggagggcgaggaggagagg

SEQ ID NO: 2771 - DNA, 23 bp, synthetic construct
  misc_feature 1..23: note = Synthetic Polynucleotide
  source 1..23: mol_type = other DNA
tcaagtgygtccttccggagcgg

SEQ ID NO: 2772 - DNA, 23 bp, synthetic construct
  misc_feature 1..23: note = Synthetic Polynucleotide
  source 1..23: mol_type = other DNA
caagtgygtccttccggagcggg

SEQ ID NO: 2773 - DNA, 23 bp, synthetic construct
  misc_feature 1..23: note = Synthetic Polynucleotide
  source 1..23: mol_type = other DNA
aagtgygtccttccggagcgggg

SEQ ID NO: 2774 - DNA, 23 bp, synthetic construct
  misc_feature 1..23: note = Synthetic Polynucleotide
  source 1..23: mol_type = other DNA
cagaggtyctttgacagctttgg

SEQ ID NO: 2775 - DNA, 23 bp, synthetic construct
  misc_feature 1..23: note = Synthetic Polynucleotide
  source 1..23: mol_type = other DNA
tgagyggatgccttctccccagg

SEQ ID NO: 2776 - DNA, 23 bp, synthetic construct
  misc_feature 1..23: note = Synthetic Polynucleotide
  source 1..23: mol_type = other DNA
ccaygtggaccctggtgagctgg

SEQ ID NO: 2777 - DNA, 23 bp, synthetic construct
  misc_feature 1..23: note = Synthetic Polynucleotide
  source 1..23: mol_type = other DNA
aagtytgatgcagaccagaaagg

SEQ ID NO: 2778 - DNA, 23 bp, synthetic construct
  misc_feature 1..23: note = Synthetic Polynucleotide
  source 1..23: mol_type = other DNA
aagygattgcagcagtgaaatgg

SEQ ID NO: 2779 - DNA, 23 bp, synthetic construct
  misc_feature 1..23: note = Synthetic Polynucleotide
  source 1..23: mol_type = other DNA
cttgygttatgatggattcatgg

SEQ ID NO: 2780 - DNA, 23 bp, synthetic construct
  misc_feature 1..23: note = Synthetic Polynucleotide
  source 1..23: mol_type = other DNA
tgtgayggacagagcacaaatgg

SEQ ID NO: 2781 - DNA, 23 bp, synthetic construct
  misc_feature 1..23: note = Synthetic Polynucleotide
  source 1..23: mol_type = other DNA
ctgtgyaagtaatacaactttgg

SEQ ID NO: 2782 - DNA, 23 bp, synthetic construct
  misc_feature 1..23: note = Synthetic Polynucleotide
  source 1..23: mol_type = other DNA
tgtaatayttctgatcatgttgg

SEQ ID NO: 2783 - DNA, 23 bp, synthetic construct
  misc_feature 1..23: note = Synthetic Polynucleotide
  source 1..23: mol_type = other DNA
tttgyggtggagaggggcttcgg

SEQ ID NO: 2784 - DNA, 23 bp, synthetic construct
  misc_feature 1..23: note = Synthetic Polynucleotide
  source 1..23: mol_type = other DNA
ttgyggtggagaggggcttcggg

SEQ ID NO: 2785 - DNA, 23 bp, synthetic construct
  misc_feature 1..23: note = Synthetic Polynucleotide
  source 1..23: mol_type = other DNA
ccaggrggatgagggcaagcagg

SEQ ID NO: 2786 - DNA, 23 bp, synthetic construct
  misc_feature 1..23: note = Synthetic Polynucleotide
  source 1..23: mol_type = other DNA
cctggbgtgtgagattgcagagg

SEQ ID NO: 2787 - DNA, 23 bp, synthetic construct
  misc_feature 1..23: note = Synthetic Polynucleotide
  source 1..23: mol_type = other DNA
ctggbgtgtgagattgcagaggg

SEQ ID NO: 2788 - DNA, 23 bp, synthetic construct
  misc_feature 1..23: note = Synthetic Polynucleotide
  source 1..23: mol_type = other DNA
cgcyggagctcatggtgagtggg

SEQ ID NO: 2789 - DNA, 23 bp, synthetic construct
  misc_feature 1..23: note = Synthetic Polynucleotide
  source 1..23: mol_type = other DNA
aagaayatgcccaaaacatctgg

SEQ ID NO: 2790 - DNA, 23 bp, synthetic construct
  misc_feature 1..23: note = Synthetic Polynucleotide
  source 1..23: mol_type = other DNA
agtaygtgaagctccagctgtgg

SEQ ID NO: 2791 - DNA, 23 bp, synthetic construct
  misc_feature 1..23: note = Synthetic Polynucleotide
  source 1..23: mol_type = other DNA
tgcabgggcctcagtcacagagg

SEQ ID NO: 2792 - DNA, 23 bp, synthetic construct
  misc_feature 1..23: note = Synthetic Polynucleotide
  source 1..23: mol_type = other DNA
agcygggtgcccagtacccttgg

SEQ ID NO: 2793 - DNA, 23 bp, synthetic construct
  misc_feature 1..23: note = Synthetic Polynucleotide
  source 1..23: mol_type = other DNA
ccctygggtgcaggtttgtgagg

SEQ ID NO: 2794 - DNA, 23 bp, synthetic construct
  misc_feature 1..23: note = Synthetic Polynucleotide
  source 1..23: mol_type = other DNA
tgatagahctttgaaaacaaagg

SEQ ID NO: 2795 - DNA, 23 bp, synthetic construct
  misc_feature 1..23: note = Synthetic Polynucleotide
  source 1..23: mol_type = other DNA
ggaggyaataactttgtaagtgg

SEQ ID NO: 2796 - DNA, 23 bp, synthetic construct
  misc_feature 1..23: note = Synthetic Polynucleotide
  source 1..23: mol_type = other DNA
caagaytggggacttcgggctgg

SEQ ID NO: 2797 - DNA, 23 bp, synthetic construct
  misc_feature 1..23: note = Synthetic Polynucleotide
  source 1..23: mol_type = other DNA
aatabgtgctgaaaatgataagg

SEQ ID NO: 2798 - DNA, 23 bp, synthetic construct
  misc_feature 1..23: note = Synthetic Polynucleotide
  source 1..23: mol_type = other DNA
agaytggtgtgcgcaacatccgg

SEQ ID NO: 2799 - DNA, 23 bp, synthetic construct
  misc_feature 1..23: note = Synthetic Polynucleotide
  source 1..23: mol_type = other DNA
gttdgtggaaagatgaagaatgg

SEQ ID NO: 2800 - DNA, 23 bp, synthetic construct
  misc_feature 1..23: note = Synthetic Polynucleotide
  source 1..23: mol_type = other DNA
tccggggrtgacaccagtaaggg

SEQ ID NO: 2801 - DNA, 23 bp, synthetic construct
  misc_feature 1..23: note = Synthetic Polynucleotide
  source 1..23: mol_type = other DNA
atcytagggtaaggtgacttagg

SEQ ID NO: 2802 - DNA, 23 bp, synthetic construct
  misc_feature 1..23: note = Synthetic Polynucleotide
  source 1..23: mol_type = other DNA
agcyggtattccctctcgagtgg

SEQ ID NO: 2803 - DNA, 23 bp, synthetic construct
  misc_feature 1..23: note = Synthetic Polynucleotide
  source 1..23: mol_type = other DNA
aatgwgagtcatggagcaacagg

SEQ ID NO: 2804 - DNA, 23 bp, synthetic construct
  misc_feature 1..23: note = Synthetic Polynucleotide
  source 1..23: mol_type = other DNA
agaytgtggatccgctggcccgg

SEQ ID NO: 2805 - DNA, 23 bp, synthetic construct
  misc_feature 1..23: note = Synthetic Polynucleotide
  source 1..23: mol_type = other DNA
aaaattygcaagtatgtcttagg

SEQ ID NO: 2806 - DNA, 23 bp, synthetic construct
  misc_feature 1..23: note = Synthetic Polynucleotide
  source 1..23: mol_type = other DNA
agcygtgggacaagagcagccgg

SEQ ID NO: 2807 - DNA, 23 bp, synthetic construct
  misc_feature 1..23: note = Synthetic Polynucleotide
  source 1..23: mol_type = other DNA
caagaaaygtgctgctgatctgg

SEQ ID NO: 2808 - DNA, 23 bp, synthetic construct
  misc_feature 1..23: note = Synthetic Polynucleotide
  source 1..23: mol_type = other DNA
aagaaaygtgctgctgatctggg

SEQ ID NO: 2809 - DNA, 23 bp, synthetic construct
  misc_feature 1..23: note = Synthetic Polynucleotide
  source 1..23: mol_type = other DNA
tccagyaagttataaaatttggg

SEQ ID NO: 2810 - DNA, 23 bp, synthetic construct
  misc_feature 1..23: note = Synthetic Polynucleotide
  source 1..23: mol_type = other DNA
cactggayatggaaatagagagg

SEQ ID NO: 2811 - DNA, 23 bp, synthetic construct
  misc_feature 1..23: note = Synthetic Polynucleotide
  source 1..23: mol_type = other DNA
caagayggcggctcccagggagg

SEQ ID NO: 2812 - DNA, 23 bp, synthetic construct
  misc_feature 1..23: note = Synthetic Polynucleotide
  source 1..23: mol_type = other DNA
ccaggyatcccgggggtaggtgg

SEQ ID NO: 2813 - DNA, 23 bp, synthetic construct
  misc_feature 1..23: note = Synthetic Polynucleotide
  source 1..23: mol_type = other DNA
actgataycaggtgagagccagg

SEQ ID NO: 2814 - DNA, 23 bp, synthetic construct
  misc_feature 1..23: note = Synthetic Polynucleotide
  source 1..23: mol_type = other DNA
acagttayaggttctggtcctgg

SEQ ID NO: 2815 - DNA, 23 bp, synthetic construct
  misc_feature 1..23: note = Synthetic Polynucleotide
  source 1..23: mol_type = other DNA
gttayaggttctggtcctggagg

SEQ ID NO: 2816 - DNA, 23 bp, synthetic construct
  misc_feature 1..23: note = Synthetic Polynucleotide
  source 1..23: mol_type = other DNA
atcatytggaacagtctacaagg

SEQ ID NO: 2817 - DNA, 23 bp, synthetic construct
  misc_feature 1..23: note = Synthetic Polynucleotide
  source 1..23: mol_type = other DNA
tcatytggaacagtctacaaggg

SEQ ID NO: 2818 - DNA, 23 bp, synthetic construct
  misc_feature 1..23: note = Synthetic Polynucleotide
  source 1..23: mol_type = other DNA
cgcaygatccacagcaccaatgg

SEQ ID NO: 2819 - DNA, 23 bp, synthetic construct
  misc_feature 1..23: note = Synthetic Polynucleotide
  source 1..23: mol_type = other DNA
aaaggygggcctgggacctgagg

SEQ ID NO: 2820 - DNA, 23 bp, synthetic construct
  misc_feature 1..23: note = Synthetic Polynucleotide
  source 1..23: mol_type = other DNA
cacgygagtggccatcctcaggg

SEQ ID NO: 2821 - DNA, 23 bp, synthetic construct
  misc_feature 1..23: note = Synthetic Polynucleotide
  source 1..23: mol_type = other DNA
ggagayggcctccatgaaggagg

SEQ ID NO: 2822 - DNA, 23 bp, synthetic construct
  misc_feature 1..23: note = Synthetic Polynucleotide
  source 1..23: mol_type = other DNA
atatagaygcctctgctcccagg

SEQ ID NO: 2823 - DNA, 23 bp, synthetic construct
  misc_feature 1..23: note = Synthetic Polynucleotide
  source 1..23: mol_type = other DNA
cttaggyaagtaatgcaatatgg

SEQ ID NO: 2824 - DNA, 23 bp, synthetic construct
  misc_feature 1..23: note = Synthetic Polynucleotide
  source 1..23: mol_type = other DNA
ggcyagaaatctgttgctatggg

SEQ ID NO: 2825 - DNA, 23 bp, synthetic construct
  misc_feature 1..23: note = Synthetic Polynucleotide
  source 1..23: mol_type = other DNA
ttcyatgatcttcgaggagaggg

SEQ ID NO: 2826 - DNA, 23 bp, synthetic construct
  misc_feature 1..23: note = Synthetic Polynucleotide
  source 1..23: mol_type = other DNA
ctgtgtgygccagggctgtgggg

SEQ ID NO: 2827 - DNA, 23 bp, synthetic construct
  misc_feature 1..23: note = Synthetic Polynucleotide
  source 1..23: mol_type = other DNA
tgcbggagggtgaggagtgcagg

SEQ ID NO: 2828 - DNA, 23 bp, synthetic construct
  misc_feature 1..23: note = Synthetic Polynucleotide
  source 1..23: mol_type = other DNA
agcaagbacgtgggcctctgggg

SEQ ID NO: 2829 - DNA, 23 bp, synthetic construct
  misc_feature 1..23: note = Synthetic Polynucleotide
  source 1..23: mol_type = other DNA
ccagahggaggagaagttcatgg

SEQ ID NO: 2830 - DNA, 23 bp, synthetic construct
  misc_feature 1..23: note = Synthetic Polynucleotide
  source 1..23: mol_type = other DNA
acttytatagtattgaataaagg

SEQ ID NO: 2831 - DNA, 23 bp, synthetic construct
  misc_feature 1..23: note = Synthetic Polynucleotide
  source 1..23: mol_type = other DNA
cttytatagtattgaataaaggg

SEQ ID NO: 2832 - DNA, 23 bp, synthetic construct
  misc_feature 1..23: note = Synthetic Polynucleotide
  source 1..23: mol_type = other DNA
acttttayagtattgaataaagg

SEQ ID NO: 2833 - DNA, 23 bp, synthetic construct
  misc_feature 1..23: note = Synthetic Polynucleotide
  source 1..23: mol_type = other DNA
cttttayagtattgaataaaggg

SEQ ID NO: 2834 - DNA, 23 bp, synthetic construct
  misc_feature 1..23: note = Synthetic Polynucleotide
  source 1..23: mol_type = other DNA
gaggargagggcttctagggagg

SEQ ID NO: 2835 - DNA, 23 bp, synthetic construct
  misc_feature 1..23: note = Synthetic Polynucleotide
  source 1..23: mol_type = other DNA
aggargagggcttctagggaggg

SEQ ID NO: 2836 - DNA, 23 bp, synthetic construct
  misc_feature 1..23: note = Synthetic Polynucleotide
  source 1..23: mol_type = other DNA
ggargagggcttctagggagggg

SEQ ID NO: 2837 - DNA, 23 bp, synthetic construct
  misc_feature 1..23: note = Synthetic Polynucleotide
  source 1..23: mol_type = other DNA
ctggyaaaaaacctggtttttgg

SEQ ID NO: 2838 - DNA, 23 bp, synthetic construct
  misc_feature 1..23: note = Synthetic Polynucleotide
  source 1..23: mol_type = other DNA
tggyaaaaaacctggtttttggg

SEQ ID NO: 2839 - DNA, 23 bp, synthetic construct
  misc_feature 1..23: note = Synthetic Polynucleotide
  source 1..23: mol_type = other DNA
aaggaaygtgttttacccggagg

SEQ ID NO: 2840 - DNA, 23 bp, synthetic construct
  misc_feature 1..23: note = Synthetic Polynucleotide
  source 1..23: mol_type = other DNA
gccragtgggtgatgtccagggg

SEQ ID NO: 2841 - DNA, 23 bp, synthetic construct
  misc_feature 1..23: note = Synthetic Polynucleotide
  source 1..23: mol_type = other DNA
atggyaaggagcaagggagcagg

SEQ ID NO: 2842 - DNA, 23 bp, synthetic construct
  misc_feature 1..23: note = Synthetic Polynucleotide
  source 1..23: mol_type = other DNA
cactgygagtaagctggaagtgg

SEQ ID NO: 2843 - DNA, 23 bp, synthetic construct
  misc_feature 1..23: note = Synthetic Polynucleotide
  source 1..23: mol_type = other DNA
aggygagggctggggtgggcagg

SEQ ID NO: 2844 - DNA, 23 bp, synthetic construct
  misc_feature 1..23: note = Synthetic Polynucleotide
  source 1..23: mol_type = other DNA
tgcyggtggccgacgtgaagcgg

SEQ ID NO: 2845 - DNA, 23 bp, synthetic construct
  misc_feature 1..23: note = Synthetic Polynucleotide
  source 1..23: mol_type = other DNA
gcagygtgagctgctcctggagg

SEQ ID NO: 2846 - DNA, 23 bp, synthetic construct
  misc_feature 1..23: note = Synthetic Polynucleotide
  source 1..23: mol_type = other DNA
atcatggyaagcaagaaacaagg

SEQ ID NO: 2847 - DNA, 23 bp, synthetic construct
  misc_feature 1..23: note = Synthetic Polynucleotide
  source 1..23: mol_type = other DNA
aagaaabtaaatatatgctatgg

SEQ ID NO: 2848 - DNA, 23 bp, synthetic construct
  misc_feature 1..23: note = Synthetic Polynucleotide
  source 1..23: mol_type = other DNA
acaagatygtctacagaaacagg

SEQ ID NO: 2849 - DNA, 23 bp, synthetic construct
  misc_feature 1..23: note = Synthetic Polynucleotide
  source 1..23: mol_type = other DNA
agaagaygctgtttaatctgagg

SEQ ID NO: 2850 - DNA, 23 bp, synthetic construct
  misc_feature 1..23: note = Synthetic Polynucleotide
  source 1..23: mol_type = other DNA
ggctgatyacctcacgctccagg

SEQ ID NO: 2851 - DNA, 23 bp, synthetic construct
  misc_feature 1..23: note = Synthetic Polynucleotide
  source 1..23: mol_type = other DNA
atgtatyaattacagacacttgg

SEQ ID NO: 2852 - DNA, 23 bp, synthetic construct
  misc_feature 1..23: note = Synthetic Polynucleotide
  source 1..23: mol_type = other DNA
acctgygggtgcgtggctgcagg

SEQ ID NO: 2853 - DNA, 23 bp, synthetic construct
  misc_feature 1..23: note = Synthetic Polynucleotide
  source 1..23: mol_type = other DNA
cctgygggtgcgtggctgcaggg

SEQ ID NO: 2854 - DNA, 23 bp, synthetic construct
  misc_feature 1..23: note = Synthetic Polynucleotide
  source 1..23: mol_type = other DNA
catgygagtgcaggcggagcagg

SEQ ID NO: 2855 - DNA, 23 bp, synthetic construct
  misc_feature 1..23: note = Synthetic Polynucleotide
  source 1..23: mol_type = other DNA
ggtgtraagagttgcgagtgtgg

SEQ ID NO: 2856 - DNA, 23 bp, synthetic construct
  misc_feature 1..23: note = Synthetic Polynucleotide
  source 1..23: mol_type = other DNA
gagaagaygacccaggtgagtgg

SEQ ID NO: 2857 - DNA, 23 bp, synthetic construct
  misc_feature 1..23: note = Synthetic Polynucleotide
  source 1..23: mol_type = other DNA
ccatagraacagcgagcctctgg

SEQ ID NO: 2858 - DNA, 23 bp, synthetic construct
  misc_feature 1..23: note = Synthetic Polynucleotide
  source 1..23: mol_type = other DNA
aatgtyggcaccatcctgggagg

SEQ ID NO: 2859 - DNA, 23 bp, synthetic construct
  misc_feature 1..23: note = Synthetic Polynucleotide
  source 1..23: mol_type = other DNA
ttcaaatbttggacccatgaagg

SEQ ID NO: 2860 - DNA, 23 bp, synthetic construct
  misc_feature 1..23: note = Synthetic Polynucleotide
  source 1..23: mol_type = other DNA
tcaaatbttggacccatgaaggg

SEQ ID NO: 2861 - DNA, 23 bp, synthetic construct
  misc_feature 1..23: note = Synthetic Polynucleotide
  source 1..23: mol_type = other DNA
aatbttggacccatgaagggagg

SEQ ID NO: 2862 - DNA, 23 bp, synthetic construct
  misc_feature 1..23: note = Synthetic Polynucleotide
  source 1..23: mol_type = other DNA
aatyttggaggcagaagctctgg

SEQ ID NO: 2863 - DNA, 23 bp, synthetic construct
  misc_feature 1..23: note = Synthetic Polynucleotide
  source 1..23: mol_type = other DNA
gcgragaggtggcggatgactgg

SEQ ID NO: 2864 - DNA, 23 bp, synthetic construct
  misc_feature 1..23: note = Synthetic Polynucleotide
  source 1..23: mol_type = other DNA
ccaagygagtacagcgcacctgg

SEQ ID NO: 2865 - DNA, 23 bp, synthetic construct
  misc_feature 1..23: note = Synthetic Polynucleotide
  source 1..23: mol_type = other DNA
caagygagtacagcgcacctggg

SEQ ID NO: 2866 - DNA, 23 bp, synthetic construct
  misc_feature 1..23: note = Synthetic Polynucleotide
  source 1..23: mol_type = other DNA
aagygagtacagcgcacctgggg

SEQ ID NO: 2867 - DNA, 23 bp, synthetic construct
  misc_feature 1..23: note = Synthetic Polynucleotide
  source 1..23: mol_type = other DNA
tcagaagyttttttcttcgcagg

SEQ ID NO: 2868 - DNA, 23 bp, synthetic construct
  misc_feature 1..23: note = Synthetic Polynucleotide
  source 1..23: mol_type = other DNA
tccayggagttccctggcctggg

SEQ ID NO: 2869 - DNA, 23 bp, synthetic construct
  misc_feature 1..23: note = Synthetic Polynucleotide
  source 1..23: mol_type = other DNA
ccayggagttccctggcctgggg

SEQ ID NO: 2870 - DNA, 23 bp, synthetic construct
  misc_feature 1..23: note = Synthetic Polynucleotide
  source 1..23: mol_type = other DNA
cgaggyattgccagcagtgcagg

SEQ ID NO: 2871 - DNA, 23 bp, synthetic construct
  misc_feature 1..23: note = Synthetic Polynucleotide
  source 1..23: mol_type = other DNA
ttcaytgtggtcattttcctggg

SEQ ID NO: 2872 - DNA, 23 bp, synthetic construct
  misc_feature 1..23: note = Synthetic Polynucleotide
  source 1..23: mol_type = other DNA
acttyatttgactactttaatgg

SEQ ID NO: 2873 - DNA, 23 bp, synthetic construct
  misc_feature 1..23: note = Synthetic Polynucleotide
  source 1..23: mol_type = other DNA
caaaatayggaacttgattttgg

SEQ ID NO: 2874 - DNA, 23 bp, synthetic construct
  misc_feature 1..23: note = Synthetic Polynucleotide
  source 1..23: mol_type = other DNA
gagagaaytgttgatgttgctgg

SEQ ID NO: 2875 - DNA, 23 bp, synthetic construct
  misc_feature 1..23: note = Synthetic Polynucleotide
  source 1..23: mol_type = other DNA
tgagtytgagagccggctggcgg

SEQ ID NO: 2876 - DNA, 23 bp, synthetic construct
  misc_feature 1..23: note = Synthetic Polynucleotide
  source 1..23: mol_type = other DNA
accatggbgagcccagggtctgg

SEQ ID NO: 2877 - DNA, 23 bp, synthetic construct
  misc_feature 1..23: note = Synthetic Polynucleotide
  source 1..23: mol_type = other DNA
ccatggbgagcccagggtctggg

SEQ ID NO: 2878 - DNA, 23 bp, synthetic construct
  misc_feature 1..23: note = Synthetic Polynucleotide
  source 1..23: mol_type = other DNA
catggbgagcccagggtctgggg

SEQ ID NO: 2879 - DNA, 23 bp, synthetic construct
  misc_feature 1..23: note = Synthetic Polynucleotide
  source 1..23: mol_type = other DNA
gaaggygtggtagggaggcacgg

SEQ ID NO: 2880 - DNA, 23 bp, synthetic construct
  misc_feature 1..23: note = Synthetic Polynucleotide
  source 1..23: mol_type = other DNA
aaggygtggtagggaggcacggg

SEQ ID NO: 2881 - DNA, 23 bp, synthetic construct
  misc_feature 1..23: note = Synthetic Polynucleotide
  source 1..23: mol_type = other DNA
aggygtggtagggaggcacgggg

SEQ ID NO: 2882 - DNA, 23 bp, synthetic construct
  misc_feature 1..23: note = Synthetic Polynucleotide
  source 1..23: mol_type = other DNA
atcattgygagtgtattataagg

SEQ ID NO: 2883 - DNA, 23 bp, synthetic construct
  misc_feature 1..23: note = Synthetic Polynucleotide
  source 1..23: mol_type = other DNA
tcattgygagtgtattataaggg

SEQ ID NO: 2884 - DNA, 23 bp, synthetic construct
  misc_feature 1..23: note = Synthetic Polynucleotide
  source 1..23: mol_type = other DNA
cattgygagtgtattataagggg

SEQ ID NO: 2885 - DNA, 23 bp, synthetic construct
  misc_feature 1..23: note = Synthetic Polynucleotide
  source 1..23: mol_type = other DNA
cattygggggcagcgagccgtgg

SEQ ID NO: 2886 - DNA, 23 bp, synthetic construct
  misc_feature 1..23: note = Synthetic Polynucleotide
  source 1..23: mol_type = other DNA
ctggagaytggggacccagaagg

SEQ ID NO: 2887 - DNA, 23 bp, synthetic construct
  misc_feature 1..23: note = Synthetic Polynucleotide
  source 1..23: mol_type = other DNA
cctaaaaygttggatgctgaagg

SEQ ID NO: 2888 - DNA, 23 bp, synthetic construct
  misc_feature 1..23: note = Synthetic Polynucleotide
  source 1..23: mol_type = other DNA
ttcyggtttgtcttatattctgg

SEQ ID NO: 2889 - DNA, 23 bp, synthetic construct
  misc_feature 1..23: note = Synthetic Polynucleotide
  source 1..23: mol_type = other DNA
tgtgghggccatggcctacgagg

SEQ ID NO: 2890 - DNA, 23 bp, synthetic construct
  misc_feature 1..23: note = Synthetic Polynucleotide
  source 1..23: mol_type = other DNA
ttgayagggagcaagcagttcgg

SEQ ID NO: 2891 - DNA, 23 bp, synthetic construct
  misc_feature 1..23: note = Synthetic Polynucleotide
  source 1..23: mol_type = other DNA
tgayagggagcaagcagttcggg

SEQ ID NO: 2892 - DNA, 23 bp, synthetic construct
  misc_feature 1..23: note = Synthetic Polynucleotide
  source 1..23: mol_type = other DNA
agcygattgagactagtgagcgg

SEQ ID NO: 2893 - DNA, 23 bp, synthetic construct
  misc_feature 1..23: note = Synthetic Polynucleotide
  source 1..23: mol_type = other DNA
accaggkgagtcacctagtaggg

SEQ ID NO: 2894 - DNA, 23 bp, synthetic construct
  misc_feature 1..23: note = Synthetic Polynucleotide
  source 1..23: mol_type = other DNA
ccaggkgagtcacctagtagggg

SEQ ID NO: 2895 - DNA, 23 bp, synthetic construct
  misc_feature 1..23: note = Synthetic Polynucleotide
  source 1..23: mol_type = other DNA
acaaggygagcgtgggctgctgg

SEQ ID NO: 2896 - DNA, 23 bp, synthetic construct
  misc_feature 1..23: note = Synthetic Polynucleotide
  source 1..23: mol_type = other DNA
caaggygagcgtgggctgctggg

SEQ ID NO: 2897 - DNA, 23 bp, synthetic construct
  misc_feature 1..23: note = Synthetic Polynucleotide
  source 1..23: mol_type = other DNA
ctgtgagygtgcccaggggcggg

SEQ ID NO: 2898 - DNA, 23 bp, synthetic construct
  misc_feature 1..23: note = Synthetic Polynucleotide
  source 1..23: mol_type = other DNA
tgagygtgcccaggggcgggcgg

SEQ ID NO: 2899 - DNA, 23 bp, synthetic construct
  misc_feature 1..23: note = Synthetic Polynucleotide
  source 1..23: mol_type = other DNA
tgtggyggccatggcctatgagg

SEQ ID NO: 2900 - DNA, 23 bp, synthetic construct
  misc_feature 1..23: note = Synthetic Polynucleotide
  source 1..23: mol_type = other DNA
cgaaatgyaagtctagttagagg

SEQ ID NO: 2901 - DNA, 23 bp, synthetic construct
  misc_feature 1..23: note = Synthetic Polynucleotide
  source 1..23: mol_type = other DNA
gaaatgyaagtctagttagaggg

SEQ ID NO: 2902 - DNA, 23 bp, synthetic construct
  misc_feature 1..23: note = Synthetic Polynucleotide
  source 1..23: mol_type = other DNA
ctttgtytgacaacaatacatgg

SEQ ID NO: 2903 - DNA, 23 bp, synthetic construct
  misc_feature 1..23: note = Synthetic Polynucleotide
  source 1..23: mol_type = other DNA
tttgtytgacaacaatacatggg

SEQ ID NO: 2904 - DNA, 23 bp, synthetic construct
  misc_feature 1..23: note = Synthetic Polynucleotide
  source 1..23: mol_type = other DNA
ggagtgaygcttcggggctcagg

SEQ ID NO: 2905 - DNA, 23 bp, synthetic construct
  misc_feature 1..23: note = Synthetic Polynucleotide
  source 1..23: mol_type = other DNA
ctcggrtaagatgctgaggaggg

SEQ ID NO: 2906 - DNA, 23 bp, synthetic construct
  misc_feature 1..23: note = Synthetic Polynucleotide
  source 1..23: mol_type = other DNA
tcggrtaagatgctgaggagggg

SEQ ID NO: 2907 - DNA, 23 bp, synthetic construct
  misc_feature 1..23: note = Synthetic Polynucleotide
  source 1..23: mol_type = other DNA
atcaytggggtggatcccgaagg

SEQ ID NO: 2908 - DNA, 23 bp, synthetic construct
  misc_feature 1..23: note = Synthetic Polynucleotide
  source 1..23: mol_type = other DNA
tcaytggggtggatcccgaaggg

SEQ ID NO: 2909 - DNA, 23 bp, synthetic construct
  misc_feature 1..23: note = Synthetic Polynucleotide
  source 1..23: mol_type = other DNA
cgtaataygggaaaaaggcgtgg

SEQ ID NO: 2910 - DNA, 23 bp, synthetic construct
  misc_feature 1..23: note = Synthetic Polynucleotide
  source 1..23: mol_type = other DNA
aataygggaaaaaggcgtggtgg

SEQ ID NO: 2911 - DNA, 23 bp, synthetic construct
  misc_feature 1..23: note = Synthetic Polynucleotide
  source 1..23: mol_type = other DNA
ataygggaaaaaggcgtggtggg

SEQ ID NO: 2912 - DNA, 23 bp, synthetic construct
  misc_feature 1..23: note = Synthetic Polynucleotide
  source 1..23: mol_type = other DNA
gttataygtgccaatgtgactgg

SEQ ID NO: 2913 - DNA, 23 bp, synthetic construct
  misc_feature 1..23: note = Synthetic Polynucleotide
  source 1..23: mol_type = other DNA
ggaagyggcgtgctgtgctgagg

SEQ ID NO: 2914 - DNA, 23 bp, synthetic construct
  misc_feature 1..23: note = Synthetic Polynucleotide
  source 1..23: mol_type = other DNA
cagtggygagactcgcccgcagg

SEQ ID NO: 2915 - DNA, 23 bp, synthetic construct
  misc_feature 1..23: note = Synthetic Polynucleotide
  source 1..23: mol_type = other DNA
agtggygagactcgcccgcaggg

SEQ ID NO: 2916 - DNA, 23 bp, synthetic construct
  misc_feature 1..23: note = Synthetic Polynucleotide
  source 1..23: mol_type = other DNA
tggahgtgcctttgctctgaagg

SEQ ID NO: 2917 - DNA, 23 bp, synthetic construct
  misc_feature 1..23: note = Synthetic Polynucleotide
  source 1..23: mol_type = other DNA
tgcyaaaagacccaaaacaaagg

SEQ ID NO: 2918 - DNA, 23 bp, synthetic construct
  misc_feature 1..23: note = Synthetic Polynucleotide
  source 1..23: mol_type = other DNA
tgagayggcccacctgggcttgg

SEQ ID NO: 2919 - DNA, 23 bp, synthetic construct
  misc_feature 1..23: note = Synthetic Polynucleotide
  source 1..23: mol_type = other DNA
gagayggcccacctgggcttggg

SEQ ID NO: 2920 - DNA, 23 bp, synthetic construct
  misc_feature 1..23: note = Synthetic Polynucleotide
  source 1..23: mol_type = other DNA
ccagaagbggtccgcaagatggg

SEQ ID NO: 2921 - DNA, 23 bp, synthetic construct
  misc_feature 1..23: note = Synthetic Polynucleotide
  source 1..23: mol_type = other DNA
aagayggtgacagaaaaggcagg

SEQ ID NO: 2922 - DNA, 23 bp, synthetic construct
  misc_feature 1..23: note = Synthetic Polynucleotide
  source 1..23: mol_type = other DNA
gccgggygttggtctgtctctgg

SEQ ID NO: 2923 - DNA, 23 bp, synthetic construct
  misc_feature 1..23: note = Synthetic Polynucleotide
  source 1..23: mol_type = other DNA
cactggygtatacacaggtgagg

SEQ ID NO: 2924 - DNA, 23 bp, synthetic construct
  misc_feature 1..23: note = Synthetic Polynucleotide
  source 1..23: mol_type = other DNA
caagaayagtaggtaaggccagg

SEQ ID NO: 2925 - DNA, 23 bp, synthetic construct
  misc_feature 1..23: note = Synthetic Polynucleotide
  source 1..23: mol_type = other DNA
agcacytgtgaggaagttcctgg

SEQ ID NO: 2926 - DNA, 23 bp, synthetic construct
  misc_feature 1..23: note = Synthetic Polynucleotide
  source 1..23: mol_type = other DNA
gcacytgtgaggaagttcctggg

SEQ ID NO: 2927 - DNA, 23 bp, synthetic construct
  misc_feature 1..23: note = Synthetic Polynucleotide
  source 1..23: mol_type = other DNA
cacytgtgaggaagttcctgggg

SEQ ID NO: 2928 - DNA, 23 bp, synthetic construct
  misc_feature 1..23: note = Synthetic Polynucleotide
  source 1..23: mol_type = other DNA
actgcggyatgggcggggccagg

SEQ ID NO: 2929 - DNA, 23 bp, synthetic construct
  misc_feature 1..23: note = Synthetic Polynucleotide
  source 1..23: mol_type = other DNA
ctgcggyatgggcggggccaggg

SEQ ID NO: 2930 - DNA, 23 bp, synthetic construct
  misc_feature 1..23: note = Synthetic Polynucleotide
  source 1..23: mol_type = other DNA
cggyatgggcggggccagggtgg

SEQ ID NO: 2931 - DNA, 23 bp, synthetic construct
  misc_feature 1..23: note = Synthetic Polynucleotide
  source 1..23: mol_type = other DNA
gggattgytgttcatgaattggg

SEQ ID NO: 2932 - DNA, 23 bp, synthetic construct
  misc_feature 1..23: note = Synthetic Polynucleotide
  source 1..23: mol_type = other DNA
gagaggygagaagagggaagcgg

SEQ ID NO: 2933 - DNA, 23 bp, synthetic construct
  misc_feature 1..23: note = Synthetic Polynucleotide
  source 1..23: mol_type = other DNA
gccagayactttgtgaagtaagg

SEQ ID NO: 2934 - DNA, 23 bp, synthetic construct
  misc_feature 1..23: note = Synthetic Polynucleotide
  source 1..23: mol_type = other DNA
ccagayactttgtgaagtaaggg

SEQ ID NO: 2935 - DNA, 23 bp, synthetic construct
  misc_feature 1..23: note = Synthetic Polynucleotide
  source 1..23: mol_type = other DNA
ccagaytgtcagcaaacacctgg

SEQ ID NO: 2936 - DNA, 23 bp, synthetic construct
  misc_feature 1..23: note = Synthetic Polynucleotide
  source 1..23: mol_type = other DNA
aagaaaayctacgccatgggtgg

SEQ ID NO: 2937 - DNA, 23 bp, synthetic construct
  misc_feature 1..23: note = Synthetic Polynucleotide
  source 1..23: mol_type = other DNA
aaaayctacgccatgggtggagg

SEQ ID NO: 2938 - DNA, 23 bp, synthetic construct
  misc_feature 1..23: note = Synthetic Polynucleotide
  source 1..23: mol_type = other DNA
gtcgagaygctggccagctacgg

SEQ ID NO: 2939 - DNA, 23 bp, synthetic construct
  misc_feature 1..23: note = Synthetic Polynucleotide
  source 1..23: mol_type = other DNA
tcgagaygctggccagctacggg

SEQ ID NO: 2940 - DNA, 23 bp, synthetic construct
  misc_feature 1..23: note = Synthetic Polynucleotide
  source 1..23: mol_type = other DNA
gacaytgatgaatgtcgctatgg

SEQ ID NO: 2941 - DNA, 23 bp, synthetic construct
  misc_feature 1..23: note = Synthetic Polynucleotide
  source 1..23: mol_type = other DNA
agatayggcttctaaaccgaagg

SEQ ID NO: 2942 - DNA, 23 bp, synthetic construct
  misc_feature 1..23: note = Synthetic Polynucleotide
  source 1..23: mol_type = other DNA
gagaytggaaattttggccgtgg

SEQ ID NO: 2943 - DNA, 23 bp, synthetic construct
  misc_feature 1..23: note = Synthetic Polynucleotide
  source 1..23: mol_type = other DNA
tctgyggaccaaaatcattctgg

SEQ ID NO: 2944 - DNA, 23 bp, synthetic construct
  misc_feature 1..23: note = Synthetic Polynucleotide
  source 1..23: mol_type = other DNA
tccaggygcgggcgtcatgctgg

SEQ ID NO: 2945 - DNA, 23 bp, synthetic construct
  misc_feature 1..23: note = Synthetic Polynucleotide
  source 1..23: mol_type = other DNA
ccaggygcgggcgtcatgctggg

SEQ ID NO: 2946 - DNA, 23 bp, synthetic construct
  misc_feature 1..23: note = Synthetic Polynucleotide
  source 1..23: mol_type = other DNA
tgatgygaggctgccgccgcagg

SEQ ID NO: 2947 - DNA, 23 bp, synthetic construct
  misc_feature 1..23: note = Synthetic Polynucleotide
  source 1..23: mol_type = other DNA
ttcaccygtatctgtatggcagg

SEQ ID NO: 2948 - DNA, 23 bp, synthetic construct
  misc_feature 1..23: note = Synthetic Polynucleotide
  source 1..23: mol_type = other DNA
accygtatctgtatggcaggtgg

SEQ ID NO: 2949 - DNA, 23 bp, synthetic construct
  misc_feature 1..23: note = Synthetic Polynucleotide
  source 1..23: mol_type = other DNA
gtcaygaaaaagccaagatgcgg

SEQ ID NO: 2950 - DNA, 23 bp, synthetic construct
  misc_feature 1..23: note = Synthetic Polynucleotide
  source 1..23: mol_type = other DNA
tcaygaaaaagccaagatgcggg

SEQ ID NO: 2951 - DNA, 23 bp, synthetic construct
  misc_feature 1..23: note = Synthetic Polynucleotide
  source 1..23: mol_type = other DNA
agcyaggtggcgacctgctccgg

SEQ ID NO: 2952 - DNA, 23 bp, synthetic construct
  misc_feature 1..23: note = Synthetic Polynucleotide
  source 1..23: mol_type = other DNA
cctgtgygtcccccaggggcagg

SEQ ID NO: 2953 - DNA, 23 bp, synthetic construct
  misc_feature 1..23: note = Synthetic Polynucleotide
  source 1..23: mol_type = other DNA
ctgtgygtcccccaggggcaggg

SEQ ID NO: 2954 - DNA, 23 bp, synthetic construct
  misc_feature 1..23: note = Synthetic Polynucleotide
  source 1..23: mol_type = other DNA
tgtgygtcccccaggggcagggg

SEQ ID NO: 2955 - DNA, 23 bp, synthetic construct
  misc_feature 1..23: note = Synthetic Polynucleotide
  source 1..23: mol_type = other DNA
gtgygtcccccaggggcaggggg

SEQ ID NO: 2956 - DNA, 23 bp, synthetic construct
  misc_feature 1..23: note = Synthetic Polynucleotide
  source 1..23: mol_type = other DNA
gtcytaggccccaaaaattttgg

SEQ ID NO: 2957 - DNA, 23 bp, synthetic construct
  misc_feature 1..23: note = Synthetic Polynucleotide
  source 1..23: mol_type = other DNA
actytgatagagtaaataatagg

SEQ ID NO: 2958 - DNA, 23 bp, synthetic construct
  misc_feature 1..23: note = Synthetic Polynucleotide
  source 1..23: mol_type = other DNA
acttygatagagtaaataatagg

SEQ ID NO: 2959 - DNA, 23 bp, synthetic construct
  misc_feature 1..23: note = Synthetic Polynucleotide
  source 1..23: mol_type = other DNA
ggcyatatacaactacgcaaagg

SEQ ID NO: 2960 - DNA, 23 bp, synthetic construct
  misc_feature 1..23: note = Synthetic Polynucleotide
  source 1..23: mol_type = other DNA
gcaaataygctatctgtagcagg

SEQ ID NO: 2961 - DNA, 23 bp, synthetic construct
  misc_feature 1..23: note = Synthetic Polynucleotide
  source 1..23: mol_type = other DNA
tcayggtgagttaaggacagtgg

SEQ ID NO: 2962 - DNA, 23 bp, synthetic construct
  misc_feature 1..23: note = Synthetic Polynucleotide
  source 1..23: mol_type = other DNA
aacagayaatgtcagacaagagg

SEQ ID NO: 2963 - DNA, 23 bp, synthetic construct
  misc_feature 1..23: note = Synthetic Polynucleotide
  source 1..23: mol_type = other DNA
gaayatataccaaggtatcccgg

SEQ ID NO: 2964 - DNA, 23 bp, synthetic construct
  misc_feature 1..23: note = Synthetic Polynucleotide
  source 1..23: mol_type = other DNA
cagttagygattggcaactttgg

SEQ ID NO: 2965 - DNA, 23 bp, synthetic construct
  misc_feature 1..23: note = Synthetic Polynucleotide
  source 1..23: mol_type = other DNA
aagygtgtgcctgtgtgccgagg

SEQ ID NO: 2966 - DNA, 23 bp, synthetic construct
  misc_feature 1..23: note = Synthetic Polynucleotide
  source 1..23: mol_type = other DNA
agctayggccgcagtgattctgg

SEQ ID NO: 2967 - DNA, 23 bp, synthetic construct
  misc_feature 1..23: note = Synthetic Polynucleotide
  source 1..23: mol_type = other DNA
gagcyggggactggacaatttgg

SEQ ID NO: 2968 - DNA, 23 bp, synthetic construct
  misc_feature 1..23: note = Synthetic Polynucleotide
  source 1..23: mol_type = other DNA
agcyggggactggacaatttggg

SEQ ID NO: 2969 - DNA, 23 bp, synthetic construct
  misc_feature 1..23: note = Synthetic Polynucleotide
  source 1..23: mol_type = other DNA
acattygggcttttggtaagtgg

SEQ ID NO: 2970 - DNA, 23 bp, synthetic construct
  misc_feature 1..23: note = Synthetic Polynucleotide
  source 1..23: mol_type = other DNA
gacagagytcctccacaacatgg

SEQ ID NO: 2971 - DNA, 23 bp, synthetic construct
  misc_feature 1..23: note = Synthetic Polynucleotide
  source 1..23: mol_type = other DNA
cacagygggtccctgtctcctgg

SEQ ID NO: 2972 - DNA, 23 bp, synthetic construct
  misc_feature 1..23: note = Synthetic Polynucleotide
  source 1..23: mol_type = other DNA
acagygggtccctgtctcctggg

SEQ ID NO: 2973 - DNA, 23 bp, synthetic construct
  misc_feature 1..23: note = Synthetic Polynucleotide
  source 1..23: mol_type = other DNA
gattbtgacttcacggtaactgg

SEQ ID NO: 2974 - DNA, 23 bp, synthetic construct
  misc_feature 1..23: note = Synthetic Polynucleotide
  source 1..23: mol_type = other DNA
attbtgacttcacggtaactggg

SEQ ID NO: 2975 - DNA, 23 bp, synthetic construct
  misc_feature 1..23: note = Synthetic Polynucleotide
  source 1..23: mol_type = other DNA
ctcaayagatgccatctccctgg

SEQ ID NO: 2976 - DNA, 23 bp, synthetic construct
  misc_feature 1..23: note = Synthetic Polynucleotide
  source 1..23: mol_type = other DNA
tcatattyacaggcttgtaaagg

SEQ ID NO: 2977 - DNA, 23 bp, synthetic construct
  misc_feature 1..23: note = Synthetic Polynucleotide
  source 1..23: mol_type = other DNA
ggtygggagggaaaagacattgg

SEQ ID NO: 2978 - DNA, 23 bp, synthetic construct
  misc_feature 1..23: note = Synthetic Polynucleotide
  source 1..23: mol_type = other DNA
aacaayggtggaacctgagaagg

SEQ ID NO: 2979 - DNA, 23 bp, synthetic construct
  misc_feature 1..23: note = Synthetic Polynucleotide
  source 1..23: mol_type = other DNA
tggggaayatacgtgcttggcgg

SEQ ID NO: 2980 - DNA, 23 bp, synthetic construct
  misc_feature 1..23: note = Synthetic Polynucleotide
  source 1..23: mol_type = other DNA
ggggaayatacgtgcttggcggg

SEQ ID NO: 2981 - DNA, 23 bp, synthetic construct
  misc_feature 1..23: note = Synthetic Polynucleotide
  source 1..23: mol_type = other DNA
cccaygtacctgccgcgccctgg

SEQ ID NO: 2982 - DNA, 23 bp, synthetic construct
  misc_feature 1..23: note = Synthetic Polynucleotide
  source 1..23: mol_type = other DNA
aaaabagagcctgagcttgatgg

SEQ ID NO: 2983 - DNA, 23 bp, synthetic construct
  misc_feature 1..23: note = Synthetic Polynucleotide
  source 1..23: mol_type = other DNA
aattygttttcttacaaaatcgg

SEQ ID NO: 2984 - DNA, 23 bp, synthetic construct
  misc_feature 1..23: note = Synthetic Polynucleotide
  source 1..23: mol_type = other DNA
aaggntgttgaggagataaatgg

SEQ ID NO: 2985 - DNA, 23 bp, synthetic construct
  misc_feature 1..23: note = Synthetic Polynucleotide
  source 1..23: mol_type = other DNA
ggataayatcaaacacgtcccgg

SEQ ID NO: 2986 - DNA, 23 bp, synthetic construct
  misc_feature 1..23: note = Synthetic Polynucleotide
  source 1..23: mol_type = other DNA
gataayatcaaacacgtcccggg

SEQ ID NO: 2987 - DNA, 23 bp, synthetic construct
  misc_feature 1..23: note = Synthetic Polynucleotide
  source 1..23: mol_type = other DNA
tctyggagggcgaggaggagagg

SEQ ID NO: 2988 - DNA, 23 bp, synthetic construct
  misc_feature 1..23: note = Synthetic Polynucleotide
  source 1..23: mol_type = other DNA
tcaagtgygtccttccggagcgg

SEQ ID NO: 2989 - DNA, 23 bp, synthetic construct
  misc_feature 1..23: note = Synthetic Polynucleotide
  source 1..23: mol_type = other DNA
caagtgygtccttccggagcggg

SEQ ID NO: 2990 - DNA, 23 bp, synthetic construct
  misc_feature 1..23: note = Synthetic Polynucleotide
  source 1..23: mol_type = other DNA
aagtgygtccttccggagcgggg

SEQ ID NO: 2991 - DNA, 23 bp, synthetic construct
  misc_feature 1..23: note = Synthetic Polynucleotide
  source 1..23: mol_type = other DNA
agtgygtccttccggagcggggg

SEQ ID NO: 2992 - DNA, 23 bp, synthetic construct
  misc_feature 1..23: note = Synthetic Polynucleotide
  source 1..23: mol_type = other DNA
cagaggtyctttgacagctttgg

SEQ ID NO: 2993 - DNA, 23 bp, synthetic construct
  misc_feature 1..23: note = Synthetic Polynucleotide
  source 1..23: mol_type = other DNA
tgagyggatgccttctccccagg

SEQ ID NO: 2994 - DNA, 23 bp, synthetic construct
  misc_feature 1..23: note = Synthetic Polynucleotide
  source 1..23: mol_type = other DNA
ccaygtggaccctggtgagctgg

SEQ ID NO: 2995 - DNA, 23 bp, synthetic construct
  misc_feature 1..23: note = Synthetic Polynucleotide
  source 1..23: mol_type = other DNA
aagtytgatgcagaccagaaagg

SEQ ID NO: 2996 - DNA, 23 bp, synthetic construct
  misc_feature 1..23: note = Synthetic Polynucleotide
  source 1..23: mol_type = other DNA
aagygattgcagcagtgaaatgg

SEQ ID NO: 2997 - DNA, 23 bp, synthetic construct
  misc_feature 1..23: note = Synthetic Polynucleotide
  source 1..23: mol_type = other DNA
cttgygttatgatggattcatgg

SEQ ID NO: 2998 - DNA, 23 bp, synthetic construct
  misc_feature 1..23: note = Synthetic Polynucleotide
  source 1..23: mol_type = other DNA
tgtgayggacagagcacaaatgg

SEQ ID NO: 2999 - DNA, 23 bp, synthetic construct
  misc_feature 1..23: note = Synthetic Polynucleotide
  source 1..23: mol_type = other DNA
ctgtgyaagtaatacaactttgg

SEQ ID NO: 3000 - DNA, 23 bp, synthetic construct
  misc_feature 1..23: note = Synthetic Polynucleotide
  source 1..23: mol_type = other DNA
tgtaatayttctgatcatgttgg

SEQ ID NO: 3001 - DNA, 23 bp, synthetic construct
  misc_feature 1..23: note = Synthetic Polynucleotide
  source 1..23: mol_type = other DNA
tttgyggtggagaggggcttcgg

SEQ ID NO: 3002 - DNA, 23 bp, synthetic construct
  misc_feature 1..23: note = Synthetic Polynucleotide
  source 1..23: mol_type = other DNA
ttgyggtggagaggggcttcggg

SEQ ID NO: 3003 - DNA, 23 bp, synthetic construct
  misc_feature 1..23: note = Synthetic Polynucleotide
  source 1..23: mol_type = other DNA
ccaggrggatgagggcaagcagg

SEQ ID NO: 3004 - DNA, 23 bp, synthetic construct
  misc_feature 1..23: note = Synthetic Polynucleotide
  source 1..23: mol_type = other DNA
cctggbgtgtgagattgcagagg

SEQ ID NO: 3005 - DNA, 23 bp, synthetic construct
  misc_feature 1..23: note = Synthetic Polynucleotide
  source 1..23: mol_type = other DNA
ctggbgtgtgagattgcagaggg

SEQ ID NO: 3006 - DNA, 23 bp, synthetic construct
  misc_feature 1..23: note = Synthetic Polynucleotide
  source 1..23: mol_type = other DNA
tcgcyggagctcatggtgagtgg

SEQ ID NO: 3007 - DNA, 23 bp, synthetic construct
  misc_feature 1..23: note = Synthetic Polynucleotide
  source 1..23: mol_type = other DNA
cgcyggagctcatggtgagtggg

SEQ ID NO: 3008 - DNA, 23 bp, synthetic construct
  misc_feature 1..23: note = Synthetic Polynucleotide
  source 1..23: mol_type = other DNA
aagaayatgcccaaaacatctgg

SEQ ID NO: 3009 - DNA, 23 bp, synthetic construct
  misc_feature 1..23: note = Synthetic Polynucleotide
  source 1..23: mol_type = other DNA
agtaygtgaagctccagctgtgg

SEQ ID NO: 3010 - DNA, 23 bp, synthetic construct
  misc_feature 1..23: note = Synthetic Polynucleotide
  source 1..23: mol_type = other DNA
tgcabgggcctcagtcacagagg

SEQ ID NO: 3011 - DNA, 23 bp, synthetic construct
  misc_feature 1..23: note = Synthetic Polynucleotide
  source 1..23: mol_type = other DNA
agcygggtgcccagtacccttgg

SEQ ID NO: 3012 - DNA, 23 bp, synthetic construct
  misc_feature 1..23: note = Synthetic Polynucleotide
  source 1..23: mol_type = other DNA
ccctygggtgcaggtttgtgagg

SEQ ID NO: 3013 - DNA, 23 bp, synthetic construct
  misc_feature 1..23: note = Synthetic Polynucleotide
  source 1..23: mol_type = other DNA
tgatagahctttgaaaacaaagg

SEQ ID NO: 3014 - DNA, 23 bp, synthetic construct
  misc_feature 1..23: note = Synthetic Polynucleotide
  source 1..23: mol_type = other DNA
ggaggyaataactttgtaagtgg

SEQ ID NO: 3015 - DNA, 23 bp, synthetic construct
  misc_feature 1..23: note = Synthetic Polynucleotide
  source 1..23: mol_type = other DNA
caagaytggggacttcgggctgg

SEQ ID NO: 3016 - DNA, 23 bp, synthetic construct
  misc_feature 1..23: note = Synthetic Polynucleotide
  source 1..23: mol_type = other DNA
aatabgtgctgaaaatgataagg

SEQ ID NO: 3017 - DNA, 23 bp, synthetic construct
  misc_feature 1..23: note = Synthetic Polynucleotide
  source 1..23: mol_type = other DNA
agaytggtgtgcgcaacatccgg

SEQ ID NO: 3018 - DNA, 23 bp, synthetic construct
  misc_feature 1..23: note = Synthetic Polynucleotide
  source 1..23: mol_type = other DNA
gttdgtggaaagatgaagaatgg

SEQ ID NO: 3019 - DNA, 23 bp, synthetic construct
  misc_feature 1..23: note = Synthetic Polynucleotide
  source 1..23: mol_type = other DNA
tccggggrtgacaccagtaaggg

SEQ ID NO: 3020 - DNA, 23 bp, synthetic construct
  misc_feature 1..23: note = Synthetic Polynucleotide
  source 1..23: mol_type = other DNA
atcytagggtaaggtgacttagg

SEQ ID NO: 3021 - DNA, 23 bp, synthetic construct
  misc_feature 1..23: note = Synthetic Polynucleotide
  source 1..23: mol_type = other DNA
agcyggtattccctctcgagtgg

SEQ ID NO: 3022 - DNA, 23 bp, synthetic construct
  misc_feature 1..23: note = Synthetic Polynucleotide
  source 1..23: mol_type = other DNA
aatgwgagtcatggagcaacagg

SEQ ID NO: 3023 - DNA, 23 bp, synthetic construct
  misc_feature 1..23: note = Synthetic Polynucleotide
  source 1..23: mol_type = other DNA
agaytgtggatccgctggcccgg

SEQ ID NO: 3024 - DNA, 23 bp, synthetic construct
  misc_feature 1..23: note = Synthetic Polynucleotide
  source 1..23: mol_type = other DNA
aaaattygcaagtatgtcttagg

SEQ ID NO: 3025 - DNA, 23 bp, synthetic construct
  misc_feature 1..23: note = Synthetic Polynucleotide
  source 1..23: mol_type = other DNA
aaattygcaagtatgtcttaggg

SEQ ID NO: 3026 - DNA, 23 bp, synthetic construct
  misc_feature 1..23: note = Synthetic Polynucleotide
  source 1..23: mol_type = other DNA
agcygtgggacaagagcagccgg

SEQ ID NO: 3027 - DNA, 23 bp, synthetic construct
  misc_feature 1..23: note = Synthetic Polynucleotide
  source 1..23: mol_type = other DNA
caagaaaygtgctgctgatctgg

SEQ ID NO: 3028 - DNA, 23 bp, synthetic construct
  misc_feature 1..23: note = Synthetic Polynucleotide
  source 1..23: mol_type = other DNA
aagaaaygtgctgctgatctggg

SEQ ID NO: 3029 - DNA, 23 bp, synthetic construct
  misc_feature 1..23: note = Synthetic Polynucleotide
  source 1..23: mol_type = other DNA
ctccagyaagttataaaatttgg

SEQ ID NO: 3030 - DNA, 23 bp, synthetic construct
  misc_feature 1..23: note = Synthetic Polynucleotide
  source 1..23: mol_type = other DNA
tccagyaagttataaaatttggg

SEQ ID NO: 3031 - DNA, 23 bp, synthetic construct
  misc_feature 1..23: note = Synthetic Polynucleotide
  source 1..23: mol_type = other DNA
cactggayatggaaatagagagg

SEQ ID NO: 3032 - DNA, 23 bp, synthetic construct
  misc_feature 1..23: note = Synthetic Polynucleotide
  source 1..23: mol_type = other DNA
caagayggcggctcccagggagg

SEQ ID NO: 3033 - DNA, 23 bp, synthetic construct
  misc_feature 1..23: note = Synthetic Polynucleotide
  source 1..23: mol_type = other DNA
ccaggyatcccgggggtaggtgg

SEQ ID NO: 3034 - DNA, 23 bp, synthetic construct
  misc_feature 1..23: note = Synthetic Polynucleotide
  source 1..23: mol_type = other DNA
caggyatcccgggggtaggtggg

SEQ ID NO: 3035 - DNA, 23 bp, synthetic construct
  misc_feature 1..23: note = Synthetic Polynucleotide
  source 1..23: mol_type = other DNA
actgataycaggtgagagccagg

SEQ ID NO: 3036 - DNA, 23 bp, synthetic construct
  misc_feature 1..23: note = Synthetic Polynucleotide
  source 1..23: mol_type = other DNA
ctgataycaggtgagagccaggg

SEQ ID NO: 3037 - DNA, 23 bp, synthetic construct
  misc_feature 1..23: note = Synthetic Polynucleotide
  source 1..23: mol_type = other DNA
acagttayaggttctggtcctgg

SEQ ID NO: 3038 - DNA, 23 bp, synthetic construct
  misc_feature 1..23: note = Synthetic Polynucleotide
  source 1..23: mol_type = other DNA
gttayaggttctggtcctggagg

SEQ ID NO: 3039 - DNA, 23 bp, synthetic construct
  misc_feature 1..23: note = Synthetic Polynucleotide
  source 1..23: mol_type = other DNA
atcatytggaacagtctacaagg

SEQ ID NO: 3040 - DNA, 23 bp, synthetic construct
  misc_feature 1..23: note = Synthetic Polynucleotide
  source 1..23: mol_type = other DNA
tcatytggaacagtctacaaggg

SEQ ID NO: 3041 - DNA, 23 bp, synthetic construct
  misc_feature 1..23: note = Synthetic Polynucleotide
  source 1..23: mol_type = other DNA
cgcaygatccacagcaccaatgg

SEQ ID NO: 3042 - DNA, 23 bp, synthetic construct
  misc_feature 1..23: note = Synthetic Polynucleotide
  source 1..23: mol_type = other DNA
aaaggygggcctgggacctgagg

SEQ ID NO: 3043 - DNA, 23 bp, synthetic construct
  misc_feature 1..23: note = Synthetic Polynucleotide
  source 1..23: mol_type = other DNA
gcacgygagtggccatcctcagg

SEQ ID NO: 3044 - DNA, 23 bp, synthetic construct
  misc_feature 1..23: note = Synthetic Polynucleotide
  source 1..23: mol_type = other DNA
cacgygagtggccatcctcaggg

SEQ ID NO: 3045 - DNA, 23 bp, synthetic construct
  misc_feature 1..23: note = Synthetic Polynucleotide
  source 1..23: mol_type = other DNA
ggagayggcctccatgaaggagg

SEQ ID NO: 3046 - DNA, 23 bp, synthetic construct
  misc_feature 1..23: note = Synthetic Polynucleotide
  source 1..23: mol_type = other DNA
atatagaygcctctgctcccagg

SEQ ID NO: 3047 - DNA, 23 bp, synthetic construct
  misc_feature 1..23: note = Synthetic Polynucleotide
  source 1..23: mol_type = other DNA
cttaggyaagtaatgcaatatgg

SEQ ID NO: 3048 - DNA, 23 bp, synthetic construct
  misc_feature 1..23: note = Synthetic Polynucleotide
  source 1..23: mol_type = other DNA
gggcyagaaatctgttgctatgg

SEQ ID NO: 3049 - DNA, 23 bp, synthetic construct
  misc_feature 1..23: note = Synthetic Polynucleotide
  source 1..23: mol_type = other DNA
ggcyagaaatctgttgctatggg

SEQ ID NO: 3050 - DNA, 23 bp, synthetic construct
  misc_feature 1..23: note = Synthetic Polynucleotide
  source 1..23: mol_type = other DNA
cttcyatgatcttcgaggagagg

SEQ ID NO: 3051 - DNA, 23 bp, synthetic construct
  misc_feature 1..23: note = Synthetic Polynucleotide
  source 1..23: mol_type = other DNA
ttcyatgatcttcgaggagaggg

SEQ ID NO: 3052 - DNA, 23 bp, synthetic construct
  misc_feature 1..23: note = Synthetic Polynucleotide
  source 1..23: mol_type = other DNA
ctgtgtgygccagggctgtgggg

SEQ ID NO: 3053 - DNA, 23 bp, synthetic construct
  misc_feature 1..23: note = Synthetic Polynucleotide
  source 1..23: mol_type = other DNA
tgcbggagggtgaggagtgcagg

SEQ ID NO: 3054 - DNA, 23 bp, synthetic construct
  misc_feature 1..23: note = Synthetic Polynucleotide
  source 1..23: mol_type = other DNA
cagcaagbacgtgggcctctggg

SEQ ID NO: 3055 - DNA, 23 bp, synthetic construct
  misc_feature 1..23: note = Synthetic Polynucleotide
  source 1..23: mol_type = other DNA
agcaagbacgtgggcctctgggg

SEQ ID NO: 3056 - DNA, 23 bp, synthetic construct
  misc_feature 1..23: note = Synthetic Polynucleotide
  source 1..23: mol_type = other DNA
gcaagbacgtgggcctctggggg

SEQ ID NO: 3057 - DNA, 23 bp, synthetic construct
  misc_feature 1..23: note = Synthetic Polynucleotide
  source 1..23: mol_type = other DNA
ccagahggaggagaagttcatgg

SEQ ID NO: 3058 - DNA, 23 bp, synthetic construct
  misc_feature 1..23: note = Synthetic Polynucleotide
  source 1..23: mol_type = other DNA
acttytatagtattgaataaagg

SEQ ID NO: 3059 - DNA, 23 bp, synthetic construct
  misc_feature 1..23: note = Synthetic Polynucleotide
  source 1..23: mol_type = other DNA
cttytatagtattgaataaaggg

SEQ ID NO: 3060 - DNA, 23 bp, synthetic construct
  misc_feature 1..23: note = Synthetic Polynucleotide
  source 1..23: mol_type = other DNA
acttttayagtattgaataaagg

SEQ ID NO: 3061 - DNA, 23 bp, synthetic construct
  misc_feature 1..23: note = Synthetic Polynucleotide
  source 1..23: mol_type = other DNA
cttttayagtattgaataaaggg

SEQ ID NO: 3062 - DNA, 23 bp, synthetic construct
  misc_feature 1..23: note = Synthetic Polynucleotide
  source 1..23: mol_type = other DNA
gaggargagggcttctagggagg

SEQ ID NO: 3063 - DNA, 23 bp, synthetic construct
  misc_feature 1..23: note = Synthetic Polynucleotide
  source 1..23: mol_type = other DNA
aggargagggcttctagggaggg

SEQ ID NO: 3064 - DNA, 23 bp, synthetic construct
  misc_feature 1..23: note = Synthetic Polynucleotide
  source 1..23: mol_type = other DNA
ggargagggcttctagggagggg

SEQ ID NO: 3065 - DNA, 23 bp, synthetic construct
  misc_feature 1..23: note = Synthetic Polynucleotide
  source 1..23: mol_type = other DNA
ctggyaaaaaacctggtttttgg

SEQ ID NO: 3066 - DNA, 23 bp, synthetic construct
  misc_feature 1..23: note = Synthetic Polynucleotide
  source 1..23: mol_type = other DNA
tggyaaaaaacctggtttttggg

SEQ ID NO: 3067 - DNA, 23 bp, synthetic construct
  misc_feature 1..23: note = Synthetic Polynucleotide
  source 1..23: mol_type = other DNA
aaggaaygtgttttacccggagg

SEQ ID NO: 3068 - DNA, 23 bp, synthetic construct
  misc_feature 1..23: note = Synthetic Polynucleotide
  source 1..23: mol_type = other DNA
gagccragtgggtgatgtccagg

SEQ ID NO: 3069 - DNA, 23 bp, synthetic construct
  misc_feature 1..23: note = Synthetic Polynucleotide
  source 1..23: mol_type = other DNA
agccragtgggtgatgtccaggg

SEQ ID NO: 3070 - DNA, 23 bp, synthetic construct
  misc_feature 1..23: note = Synthetic Polynucleotide
  source 1..23: mol_type = other DNA
gccragtgggtgatgtccagggg

SEQ ID NO: 3071 - DNA, 23 bp, synthetic construct
  misc_feature 1..23: note = Synthetic Polynucleotide
  source 1..23: mol_type = other DNA
atggyaaggagcaagggagcagg

SEQ ID NO: 3072 - DNA, 23 bp, synthetic construct
  misc_feature 1..23: note = Synthetic Polynucleotide
  source 1..23: mol_type = other DNA
cactgygagtaagctggaagtgg

SEQ ID NO: 3073 - DNA, 23 bp, synthetic construct
  misc_feature 1..23: note = Synthetic Polynucleotide
  source 1..23: mol_type = other DNA
cttcaggygagggctggggtggg

SEQ ID NO: 3074 - DNA, 23 bp, synthetic construct
  misc_feature 1..23: note = Synthetic Polynucleotide
  source 1..23: mol_type = other DNA
aggygagggctggggtgggcagg

SEQ ID NO: 3075 - DNA, 23 bp, synthetic construct
  misc_feature 1..23: note = Synthetic Polynucleotide
  source 1..23: mol_type = other DNA
tgcyggtggccgacgtgaagcgg

SEQ ID NO: 3076 - DNA, 23 bp, synthetic construct
  misc_feature 1..23: note = Synthetic Polynucleotide
  source 1..23: mol_type = other DNA
caagcagygtgagctgctcctgg

SEQ ID NO: 3077 - DNA, 23 bp, synthetic construct
  misc_feature 1..23: note = Synthetic Polynucleotide
  source 1..23: mol_type = other DNA
gcagygtgagctgctcctggagg

SEQ ID NO: 3078 - DNA, 23 bp, synthetic construct
  misc_feature 1..23: note = Synthetic Polynucleotide
  source 1..23: mol_type = other DNA
atcatggyaagcaagaaacaagg

SEQ ID NO: 3079 - DNA, 23 bp, synthetic construct
  misc_feature 1..23: note = Synthetic Polynucleotide
  source 1..23: mol_type = other DNA
aagaaabtaaatatatgctatgg

SEQ ID NO: 3080 - DNA, 23 bp, synthetic construct
  misc_feature 1..23: note = Synthetic Polynucleotide
  source 1..23: mol_type = other DNA
acaagatygtctacagaaacagg

SEQ ID NO: 3081 - DNA, 23 bp, synthetic construct
  misc_feature 1..23: note = Synthetic Polynucleotide
  source 1..23: mol_type = other DNA
agaagaygctgtttaatctgagg

SEQ ID NO: 3082 - DNA, 23 bp, synthetic construct
  misc_feature 1..23: note = Synthetic Polynucleotide
  source 1..23: mol_type = other DNA
ggctgatyacctcacgctccagg

SEQ ID NO: 3083 - DNA, 23 bp, synthetic construct
  misc_feature 1..23: note = Synthetic Polynucleotide
  source 1..23: mol_type = other DNA
gatyacctcacgctccaggttgg

SEQ ID NO: 3084 - DNA, 23 bp, synthetic construct
  misc_feature 1..23: note = Synthetic Polynucleotide
  source 1..23: mol_type = other DNA
atgtatyaattacagacacttgg

SEQ ID NO: 3085 - DNA, 23 bp, synthetic construct
  misc_feature 1..23: note = Synthetic Polynucleotide
  source 1..23: mol_type = other DNA
acctgygggtgcgtggctgcagg

SEQ ID NO: 3086 - DNA, 23 bp, synthetic construct
  misc_feature 1..23: note = Synthetic Polynucleotide
  source 1..23: mol_type = other DNA
cctgygggtgcgtggctgcaggg

SEQ ID NO: 3087 - DNA, 23 bp, synthetic construct
  misc_feature 1..23: note = Synthetic Polynucleotide
  source 1..23: mol_type = other DNA
catgygagtgcaggcggagcagg

SEQ ID NO: 3088 - DNA, 23 bp, synthetic construct
  misc_feature 1..23: note = Synthetic Polynucleotide
  source 1..23: mol_type = other DNA
ggtgtraagagttgcgagtgtgg

SEQ ID NO: 3089 - DNA, 23 bp, synthetic construct
  misc_feature 1..23: note = Synthetic Polynucleotide
  source 1..23: mol_type = other DNA
gagaagaygacccaggtgagtgg

SEQ ID NO: 3090 - DNA, 23 bp, synthetic construct
  misc_feature 1..23: note = Synthetic Polynucleotide
  source 1..23: mol_type = other DNA
ccatagraacagcgagcctctgg

SEQ ID NO: 3091 - DNA, 23 bp, synthetic construct
  misc_feature 1..23: note = Synthetic Polynucleotide
  source 1..23: mol_type = other DNA
aatgtyggcaccatcctgggagg

SEQ ID NO: 3092 - DNA, 23 bp, synthetic construct
  misc_feature 1..23: note = Synthetic Polynucleotide
  source 1..23: mol_type = other DNA
ttcaaatbttggacccatgaagg

SEQ ID NO: 3093 - DNA, 23 bp, synthetic construct
  misc_feature 1..23: note = Synthetic Polynucleotide
  source 1..23: mol_type = other DNA
tcaaatbttggacccatgaaggg

SEQ ID NO: 3094 - DNA, 23 bp, synthetic construct
  misc_feature 1..23: note = Synthetic Polynucleotide
  source 1..23: mol_type = other DNA
aatbttggacccatgaagggagg

SEQ ID NO: 3095 - DNA, 23 bp, synthetic construct
  misc_feature 1..23: note = Synthetic Polynucleotide
  source 1..23: mol_type = other DNA
aatyttggaggcagaagctctgg

SEQ ID NO: 3096 - DNA, 23 bp, synthetic construct
  misc_feature 1..23: note = Synthetic Polynucleotide
  source 1..23: mol_type = other DNA
gcgragaggtggcggatgactgg

SEQ ID NO: 3097 - DNA, 23 bp, synthetic construct
  misc_feature 1..23: note = Synthetic Polynucleotide
  source 1..23: mol_type = other DNA
ccaagygagtacagcgcacctgg

SEQ ID NO: 3098 - DNA, 23 bp, synthetic construct
  misc_feature 1..23: note = Synthetic Polynucleotide
  source 1..23: mol_type = other DNA
caagygagtacagcgcacctggg

SEQ ID NO: 3099 - DNA, 23 bp, synthetic construct
  misc_feature 1..23: note = Synthetic Polynucleotide
  source 1..23: mol_type = other DNA
aagygagtacagcgcacctgggg

SEQ ID NO: 3100 - DNA, 23 bp, synthetic construct
  misc_feature 1..23: note = Synthetic Polynucleotide
  source 1..23: mol_type = other DNA
tcagaagyttttttcttcgcagg

SEQ ID NO: 3101 - DNA, 23 bp, synthetic construct
  misc_feature 1..23: note = Synthetic Polynucleotide
  source 1..23: mol_type = other DNA
ctccayggagttccctggcctgg

SEQ ID NO: 3102 - DNA, 23 bp, synthetic construct
  misc_feature 1..23: note = Synthetic Polynucleotide
  source 1..23: mol_type = other DNA
tccayggagttccctggcctggg

SEQ ID NO: 3103 - DNA, 23 bp, synthetic construct
  misc_feature 1..23: note = Synthetic Polynucleotide
  source 1..23: mol_type = other DNA
ccayggagttccctggcctgggg

SEQ ID NO: 3104 - DNA, 23 bp, synthetic construct
  misc_feature 1..23: note = Synthetic Polynucleotide
  source 1..23: mol_type = other DNA
cgaggyattgccagcagtgcagg

SEQ ID NO: 3105 - DNA, 23 bp, synthetic construct
  misc_feature 1..23: note = Synthetic Polynucleotide
  source 1..23: mol_type = other DNA
cttcaytgtggtcattttcctgg

SEQ ID NO: 3106 - DNA, 23 bp, synthetic construct
  misc_feature 1..23: note = Synthetic Polynucleotide
  source 1..23: mol_type = other DNA
ttcaytgtggtcattttcctggg

SEQ ID NO: 3107 - DNA, 23 bp, synthetic construct
  misc_feature 1..23: note = Synthetic Polynucleotide
  source 1..23: mol_type = other DNA
acttyatttgactactttaatgg

SEQ ID NO: 3108 - DNA, 23 bp, synthetic construct
  misc_feature 1..23: note = Synthetic Polynucleotide
  source 1..23: mol_type = other DNA
caaaatayggaacttgattttgg

SEQ ID NO: 3109 - DNA, 23 bp, synthetic construct
  misc_feature 1..23: note = Synthetic Polynucleotide
  source 1..23: mol_type = other DNA
gagagaaytgttgatgttgctgg

SEQ ID NO: 3110 - DNA, 23 bp, synthetic construct
  misc_feature 1..23: note = Synthetic Polynucleotide
  source 1..23: mol_type = other DNA
tgagtytgagagccggctggcgg

SEQ ID NO: 3111 - DNA, 23 bp, synthetic construct
  misc_feature 1..23: note = Synthetic Polynucleotide
  source 1..23: mol_type = other DNA
accatggbgagcccagggtctgg

SEQ ID NO: 3112 - DNA, 23 bp, synthetic construct
  misc_feature 1..23: note = Synthetic Polynucleotide
  source 1..23: mol_type = other DNA
ccatggbgagcccagggtctggg

SEQ ID NO: 3113 - DNA, 23 bp, synthetic construct
  misc_feature 1..23: note = Synthetic Polynucleotide
  source 1..23: mol_type = other DNA
catggbgagcccagggtctgggg

SEQ ID NO: 3114 - DNA, 23 bp, synthetic construct
  misc_feature 1..23: note = Synthetic Polynucleotide
  source 1..23: mol_type = other DNA
gaaggygtggtagggaggcacgg

SEQ ID NO: 3115 - DNA, 23 bp, synthetic construct
  misc_feature 1..23: note = Synthetic Polynucleotide
  source 1..23: mol_type = other DNA
aaggygtggtagggaggcacggg

SEQ ID NO: 3116 - DNA, 23 bp, synthetic construct
  misc_feature 1..23: note = Synthetic Polynucleotide
  source 1..23: mol_type = other DNA
aggygtggtagggaggcacgggg

SEQ ID NO: 3117 - DNA, 23 bp, synthetic construct
  misc_feature 1..23: note = Synthetic Polynucleotide
  source 1..23: mol_type = other DNA
atcattgygagtgtattataagg

SEQ ID NO: 3118 - DNA, 23 bp, synthetic construct
  misc_feature 1..23: note = Synthetic Polynucleotide
  source 1..23: mol_type = other DNA
tcattgygagtgtattataaggg

SEQ ID NO: 3119 - DNA, 23 bp, synthetic construct
  misc_feature 1..23: note = Synthetic Polynucleotide
  source 1..23: mol_type = other DNA
cattgygagtgtattataagggg

SEQ ID NO: 3120 - DNA, 23 bp, synthetic construct
  misc_feature 1..23: note = Synthetic Polynucleotide
  source 1..23: mol_type = other DNA
cattygggggcagcgagccgtgg

SEQ ID NO: 3121 - DNA, 23 bp, synthetic construct
  misc_feature 1..23: note = Synthetic Polynucleotide
  source 1..23: mol_type = other DNA
ctggagaytggggacccagaagg

SEQ ID NO: 3122 - DNA, 23 bp, synthetic construct
  misc_feature 1..23: note = Synthetic Polynucleotide
  source 1..23: mol_type = other DNA
cctaaaaygttggatgctgaagg

SEQ ID NO: 3123 - DNA, 23 bp, synthetic construct
  misc_feature 1..23: note = Synthetic Polynucleotide
  source 1..23: mol_type = other DNA
ttcyggtttgtcttatattctgg

SEQ ID NO: 3124 - DNA, 23 bp, synthetic construct
  misc_feature 1..23: note = Synthetic Polynucleotide
  source 1..23: mol_type = other DNA
tgtgghggccatggcctacgagg

SEQ ID NO: 3125 - DNA, 23 bp, synthetic construct
  misc_feature 1..23: note = Synthetic Polynucleotide
  source 1..23: mol_type = other DNA
ttgayagggagcaagcagttcgg

SEQ ID NO: 3126 - DNA, 23 bp, synthetic construct
  misc_feature 1..23: note = Synthetic Polynucleotide
  source 1..23: mol_type = other DNA
tgayagggagcaagcagttcggg

SEQ ID NO: 3127 - DNA, 23 bp, synthetic construct
  misc_feature 1..23: note = Synthetic Polynucleotide
  source 1..23: mol_type = other DNA
agcygattgagactagtgagcgg

SEQ ID NO: 3128 - DNA, 23 bp, synthetic construct
  misc_feature 1..23: note = Synthetic Polynucleotide
  source 1..23: mol_type = other DNA
caccaggkgagtcacctagtagg

SEQ ID NO: 3129 - DNA, 23 bp, synthetic construct
  misc_feature 1..23: note = Synthetic Polynucleotide
  source 1..23: mol_type = other DNA
accaggkgagtcacctagtaggg

SEQ ID NO: 3130 - DNA, 23 bp, synthetic construct
  misc_feature 1..23: note = Synthetic Polynucleotide
  source 1..23: mol_type = other DNA
ccaggkgagtcacctagtagggg

SEQ ID NO: 3131 - DNA, 23 bp, synthetic construct
  misc_feature 1..23: note = Synthetic Polynucleotide
  source 1..23: mol_type = other DNA
acaaggygagcgtgggctgctgg

SEQ ID NO: 3132 - DNA, 23 bp, synthetic construct
  misc_feature 1..23: note = Synthetic Polynucleotide
  source 1..23: mol_type = other DNA
caaggygagcgtgggctgctggg

SEQ ID NO: 3133 - DNA, 23 bp, synthetic construct
  misc_feature 1..23: note = Synthetic Polynucleotide
  source 1..23: mol_type = other DNA
ctgtgagygtgcccaggggcggg

SEQ ID NO: 3134 - DNA, 23 bp, synthetic construct
  misc_feature 1..23: note = Synthetic Polynucleotide
  source 1..23: mol_type = other DNA
tgagygtgcccaggggcgggcgg

SEQ ID NO: 3135 - DNA, 23 bp, synthetic construct
  misc_feature 1..23: note = Synthetic Polynucleotide
  source 1..23: mol_type = other DNA
tgtggyggccatggcctatgagg

SEQ ID NO: 3136 - DNA, 23 bp, synthetic construct
  misc_feature 1..23: note = Synthetic Polynucleotide
  source 1..23: mol_type = other DNA
cgaaatgyaagtctagttagagg

SEQ ID NO: 3137 - DNA, 23 bp, synthetic construct
  misc_feature 1..23: note = Synthetic Polynucleotide
  source 1..23: mol_type = other DNA
gaaatgyaagtctagttagaggg

SEQ ID NO: 3138 - DNA, 23 bp, synthetic construct
  misc_feature 1..23: note = Synthetic Polynucleotide
  source 1..23: mol_type = other DNA
ctttgtytgacaacaatacatgg

SEQ ID NO: 3139 - DNA, 23 bp, synthetic construct
  misc_feature 1..23: note = Synthetic Polynucleotide
  source 1..23: mol_type = other DNA
tttgtytgacaacaatacatggg

SEQ ID NO: 3140 - DNA, 23 bp, synthetic construct
  misc_feature 1..23: note = Synthetic Polynucleotide
  source 1..23: mol_type = other DNA
ggagtgaygcttcggggctcagg

SEQ ID NO: 3141 - DNA, 23 bp, synthetic construct
  misc_feature 1..23: note = Synthetic Polynucleotide
  source 1..23: mol_type = other DNA
actcggrtaagatgctgaggagg

SEQ ID NO: 3142 - DNA, 23 bp, synthetic construct
  misc_feature 1..23: note = Synthetic Polynucleotide
  source 1..23: mol_type = other DNA
ctcggrtaagatgctgaggaggg

SEQ ID NO: 3143 - DNA, 23 bp, synthetic construct
  misc_feature 1..23: note = Synthetic Polynucleotide
  source 1..23: mol_type = other DNA
tcggrtaagatgctgaggagggg

SEQ ID NO: 3144 - DNA, 23 bp, synthetic construct
  misc_feature 1..23: note = Synthetic Polynucleotide
  source 1..23: mol_type = other DNA
cgcgcytgcgcttcgcttcctgg

SEQ ID NO: 3145 - DNA, 23 bp, synthetic construct
  misc_feature 1..23: note = Synthetic Polynucleotide
  source 1..23: mol_type = other DNA
agctcygtttcgtgatgttttgg

SEQ ID NO: 3146 - DNA, 23 bp, synthetic construct
  misc_feature 1..23: note = Synthetic Polynucleotide
  source 1..23: mol_type = other DNA
cactggygtatacacaggtgagg

SEQ ID NO: 3147 - DNA, 23 bp, synthetic construct
  misc_feature 1..23: note = Synthetic Polynucleotide
  source 1..23: mol_type = other DNA
agttacgycaaggtgatgctggg

SEQ ID NO: 3148 - DNA, 23 bp, synthetic construct
  misc_feature 1..23: note = Synthetic Polynucleotide
  source 1..23: mol_type = other DNA
ggtgygcgggggcgtgctcgagg

SEQ ID NO: 3149 - DNA, 23 bp, synthetic construct
  misc_feature 1..23: note = Synthetic Polynucleotide
  source 1..23: mol_type = other DNA
gtgygcgggggcgtgctcgaggg

SEQ ID NO: 3150 - DNA, 23 bp, synthetic construct
  misc_feature 1..23: note = Synthetic Polynucleotide
  source 1..23: mol_type = other DNA
cgaggyattgccagcagtgcagg

SEQ ID NO: 3151 - DNA, 23 bp, synthetic construct
  misc_feature 1..23: note = Synthetic Polynucleotide
  source 1..23: mol_type = other DNA
cgccygcgacaagccacagcagg

SEQ ID NO: 3152 - DNA, 23 bp, synthetic construct
  misc_feature 1..23: note = Synthetic Polynucleotide
  source 1..23: mol_type = other DNA
tgcyggtggccgacgtgaagcgg

SEQ ID NO: 3153 - DNA, 23 bp, synthetic construct
  misc_feature 1..23: note = Synthetic Polynucleotide
  source 1..23: mol_type = other DNA
ctgcaccyccaccagagccatgg

SEQ ID NO: 3154 - DNA, 23 bp, synthetic construct
  misc_feature 1..23: note = Synthetic Polynucleotide
  source 1..23: mol_type = other DNA
tgtgayggacagagcacaaatgg

SEQ ID NO: 3155 - DNA, 23 bp, synthetic construct
  misc_feature 1..23: note = Synthetic Polynucleotide
  source 1..23: mol_type = other DNA
agagaycgccaacatgtcactgg

SEQ ID NO: 3156 - DNA, 23 bp, synthetic construct
  misc_feature 1..23: note = Synthetic Polynucleotide
  source 1..23: mol_type = other DNA
gctgcyccagatgccctctgtgg

SEQ ID NO: 3157 - DNA, 23 bp, synthetic construct
  misc_feature 1..23: note = Synthetic Polynucleotide
  source 1..23: mol_type = other DNA
aactcctyctacagcagcaaagg

SEQ ID NO: 3158 - DNA, 23 bp, synthetic construct
  misc_feature 1..23: note = Synthetic Polynucleotide
  source 1..23: mol_type = other DNA
aattygttttcttacaaaatcgg

SEQ ID NO: 3159 - DNA, 23 bp, synthetic construct
  misc_feature 1..23: note = Synthetic Polynucleotide
  source 1..23: mol_type = other DNA
gctgccgygcgtggcccgagggg

SEQ ID NO: 3160 - DNA, 23 bp, synthetic construct
  misc_feature 1..23: note = Synthetic Polynucleotide
  source 1..23: mol_type = other DNA
ctgccgygcgtggcccgaggggg

SEQ ID NO: 3161 - DNA, 23 bp, synthetic construct
  misc_feature 1..23: note = Synthetic Polynucleotide
  source 1..23: mol_type = other DNA
gagaytggaaattttggccgtgg

SEQ ID NO: 3162 - DNA, 23 bp, synthetic construct
  misc_feature 1..23: note = Synthetic Polynucleotide
  source 1..23: mol_type = other DNA
ggtygggagggaaaagacattgg

SEQ ID NO: 3163 - DNA, 23 bp, synthetic construct
  misc_feature 1..23: note = Synthetic Polynucleotide
  source 1..23: mol_type = other DNA
caagttcytccacaaggtgaggg

SEQ ID NO: 3164 - DNA, 23 bp, synthetic construct
  misc_feature 1..23: note = Synthetic Polynucleotide
  source 1..23: mol_type = other DNA
ttcytccacaaggtgagggccgg

SEQ ID NO: 3165 - DNA, 23 bp, synthetic construct
  misc_feature 1..23: note = Synthetic Polynucleotide
  source 1..23: mol_type = other DNA
tgggcgcygcatgcgaggagagg

SEQ ID NO: 3166 - DNA, 23 bp, synthetic construct
  misc_feature 1..23: note = Synthetic Polynucleotide
  source 1..23: mol_type = other DNA
cgcygcatgcgaggagaggctgg

SEQ ID NO: 3167 - DNA, 23 bp, synthetic construct
  misc_feature 1..23: note = Synthetic Polynucleotide
  source 1..23: mol_type = other DNA
tatgacyggcggctggagcccgg

SEQ ID NO: 3168 - DNA, 23 bp, synthetic construct
  misc_feature 1..23: note = Synthetic Polynucleotide
  source 1..23: mol_type = other DNA
gaacgagyctgaaatcatcccgg

SEQ ID NO: 3169 - DNA, 23 bp, synthetic construct
  misc_feature 1..23: note = Synthetic Polynucleotide
  source 1..23: mol_type = other DNA
caaaatayggaacttgattttgg

SEQ ID NO: 3170 - DNA, 23 bp, synthetic construct
  misc_feature 1..23: note = Synthetic Polynucleotide
  source 1..23: mol_type = other DNA
aaaaaacyctacactctggatgg

SEQ ID NO: 3171 - DNA, 23 bp, synthetic construct
  misc_feature 1..23: note = Synthetic Polynucleotide
  source 1..23: mol_type = other DNA
gatccycgttgtggctgcaaagg

SEQ ID NO: 3172 - DNA, 23 bp, synthetic construct
  misc_feature 1..23: note = Synthetic Polynucleotide
  source 1..23: mol_type = other DNA
ccctgcycacctgcctttcctgg

SEQ ID NO: 3173 - DNA, 23 bp, synthetic construct
  misc_feature 1..23: note = Synthetic Polynucleotide
  source 1..23: mol_type = other DNA
ggaayctttaaaaaaagtgaagg

SEQ ID NO: 3174 - DNA, 23 bp, synthetic construct
  misc_feature 1..23: note = Synthetic Polynucleotide
  source 1..23: mol_type = other DNA
atcacggyaagaatggtacatgg

SEQ ID NO: 3175 - DNA, 23 bp, synthetic construct
  misc_feature 1..23: note = Synthetic Polynucleotide
  source 1..23: mol_type = other DNA
tcacggyaagaatggtacatggg

SEQ ID NO: 3176 - DNA, 23 bp, synthetic construct
  misc_feature 1..23: note = Synthetic Polynucleotide
  source 1..23: mol_type = other DNA
ctatcyttctcagggagggaagg

SEQ ID NO: 3177 - DNA, 23 bp, synthetic construct
  misc_feature 1..23: note = Synthetic Polynucleotide
  source 1..23: mol_type = other DNA
gattgacyggaaggcctacatgg

SEQ ID NO: 3178 - DNA, 23 bp, synthetic construct
  misc_feature 1..23: note = Synthetic Polynucleotide
  source 1..23: mol_type = other DNA
gcaaataygctatctgtagcagg

SEQ ID NO: 3179 - DNA, 23 bp, synthetic construct
  misc_feature 1..23: note = Synthetic Polynucleotide
  source 1..23: mol_type = other DNA
ccacyggcattatcgagacctgg

SEQ ID NO: 3180 - DNA, 23 bp, synthetic construct
  misc_feature 1..23: note = Synthetic Polynucleotide
  source 1..23: mol_type = other DNA
gtacctgyactgggctgactggg

SEQ ID NO: 3181 - DNA, 23 bp, synthetic construct
  misc_feature 1..23: note = Synthetic Polynucleotide
  source 1..23: mol_type = other DNA
ttcctygtatcccaatgctaagg

SEQ ID NO: 3182 - DNA, 23 bp, synthetic construct
  misc_feature 1..23: note = Synthetic Polynucleotide
  source 1..23: mol_type = other DNA
caagayggcggctcccagggagg

SEQ ID NO: 3183 - DNA, 23 bp, synthetic construct
  misc_feature 1..23: note = Synthetic Polynucleotide
  source 1..23: mol_type = other DNA
ccaggyatcccgggggtaggtgg

SEQ ID NO: 3184 - DNA, 23 bp, synthetic construct
  misc_feature 1..23: note = Synthetic Polynucleotide
  source 1..23: mol_type = other DNA
caggyatcccgggggtaggtggg

SEQ ID NO: 3185 - DNA, 23 bp, synthetic construct
  misc_feature 1..23: note = Synthetic Polynucleotide
  source 1..23: mol_type = other DNA
gatgaggyagatgcacacaaagg

SEQ ID NO: 3186 - DNA, 23 bp, synthetic construct
  misc_feature 1..23: note = Synthetic Polynucleotide
  source 1..23: mol_type = other DNA
ctggyaaaaaacctggtttttgg

SEQ ID NO: 3187 - DNA, 23 bp, synthetic construct
  misc_feature 1..23: note = Synthetic Polynucleotide
  source 1..23: mol_type = other DNA
tggyaaaaaacctggtttttggg

SEQ ID NO: 3188 - DNA, 23 bp, synthetic construct
  misc_feature 1..23: note = Synthetic Polynucleotide
  source 1..23: mol_type = other DNA
acaaaacytcaatgaaacgtggg

SEQ ID NO: 3189 - DNA, 23 bp, synthetic construct
  misc_feature 1..23: note = Synthetic Polynucleotide
  source 1..23: mol_type = other DNA
gctccyagtggccatgcacgtgg

SEQ ID NO: 3190 - DNA, 23 bp, synthetic construct
  misc_feature 1..23: note = Synthetic Polynucleotide
  source 1..23: mol_type = other DNA
aagatcaytggcaattcagtggg

SEQ ID NO: 3191 - DNA, 23 bp, synthetic construct
  misc_feature 1..23: note = Synthetic Polynucleotide
  source 1..23: mol_type = other DNA
agatcaytggcaattcagtgggg

SEQ ID NO: 3192 - DNA, 23 bp, synthetic construct
  misc_feature 1..23: note = Synthetic Polynucleotide
  source 1..23: mol_type = other DNA
gatcaytggcaattcagtggggg

SEQ ID NO: 3193 - DNA, 23 bp, synthetic construct
  misc_feature 1..23: note = Synthetic Polynucleotide
  source 1..23: mol_type = other DNA
ggaggyaataactttgtaagtgg

SEQ ID NO: 3194 - DNA, 23 bp, synthetic construct
  misc_feature 1..23: note = Synthetic Polynucleotide
  source 1..23: mol_type = other DNA
cggyaactaactaactataatgg

SEQ ID NO: 3195 - DNA, 23 bp, synthetic construct
  misc_feature 1..23: note = Synthetic Polynucleotide
  source 1..23: mol_type = other DNA
aatgtyggcaccatcctgggagg

SEQ ID NO: 3196 - DNA, 23 bp, synthetic construct
  misc_feature 1..23: note = Synthetic Polynucleotide
  source 1..23: mol_type = other DNA
tcccygtgctgctggagttgtgg

SEQ ID NO: 3197 - DNA, 23 bp, synthetic construct
  misc_feature 1..23: note = Synthetic Polynucleotide
  source 1..23: mol_type = other DNA
cccygtgctgctggagttgtggg

SEQ ID NO: 3198 - DNA, 23 bp, synthetic construct
  misc_feature 1..23: note = Synthetic Polynucleotide
  source 1..23: mol_type = other DNA
ccaacyttttactattcagaagg

SEQ ID NO: 3199 - DNA, 23 bp, synthetic construct
  misc_feature 1..23: note = Synthetic Polynucleotide
  source 1..23: mol_type = other DNA
aatyttggaggcagaagctctgg

SEQ ID NO: 3200 - DNA, 23 bp, synthetic construct
  misc_feature 1..23: note = Synthetic Polynucleotide
  source 1..23: mol_type = other DNA
ccgccygcggggataaagccagg

SEQ ID NO: 3201 - DNA, 23 bp, synthetic construct
  misc_feature 1..23: note = Synthetic Polynucleotide
  source 1..23: mol_type = other DNA
cgccygcggggataaagccaggg

SEQ ID NO: 3202 - DNA, 23 bp, synthetic construct
  misc_feature 1..23: note = Synthetic Polynucleotide
  source 1..23: mol_type = other DNA
atggyaaggagcaagggagcagg

SEQ ID NO: 3203 - DNA, 23 bp, synthetic construct
  misc_feature 1..23: note = Synthetic Polynucleotide
  source 1..23: mol_type = other DNA
gaatctycacagccgctctccgg

SEQ ID NO: 3204 - DNA, 23 bp, synthetic construct
  misc_feature 1..23: note = Synthetic Polynucleotide
  source 1..23: mol_type = other DNA
cactgygagtaagctggaagtgg

SEQ ID NO: 3205 - DNA, 23 bp, synthetic construct
  misc_feature 1..23: note = Synthetic Polynucleotide
  source 1..23: mol_type = other DNA
gatgyctgacgggtagcctgtgg

SEQ ID NO: 3206 - DNA, 23 bp, synthetic construct
  misc_feature 1..23: note = Synthetic Polynucleotide
  source 1..23: mol_type = other DNA
atgyctgacgggtagcctgtggg

SEQ ID NO: 3207 - DNA, 23 bp, synthetic construct
  misc_feature 1..23: note = Synthetic Polynucleotide
  source 1..23: mol_type = other DNA
gctccygggcttcgtggccatgg

SEQ ID NO: 3208 - DNA, 23 bp, synthetic construct
  misc_feature 1..23: note = Synthetic Polynucleotide
  source 1..23: mol_type = other DNA
gtcgcyagggctcgtgtcgctgg

SEQ ID NO: 3209 - DNA, 23 bp, synthetic construct
  misc_feature 1..23: note = Synthetic Polynucleotide
  source 1..23: mol_type = other DNA
tcgcyagggctcgtgtcgctggg

SEQ ID NO: 3210 - DNA, 23 bp, synthetic construct
  misc_feature 1..23: note = Synthetic Polynucleotide
  source 1..23: mol_type = other DNA
ggccgacytctccgtgtcggtgg

SEQ ID NO: 3211 - DNA, 23 bp, synthetic construct
  misc_feature 1..23: note = Synthetic Polynucleotide
  source 1..23: mol_type = other DNA
actgcggyatgggcggggccagg

SEQ ID NO: 3212 - DNA, 23 bp, synthetic construct
  misc_feature 1..23: note = Synthetic Polynucleotide
  source 1..23: mol_type = other DNA
ctgcggyatgggcggggccaggg

SEQ ID NO: 3213 - DNA, 23 bp, synthetic construct
  misc_feature 1..23: note = Synthetic Polynucleotide
  source 1..23: mol_type = other DNA
cggyatgggcggggccagggtgg

SEQ ID NO: 3214 - DNA, 23 bp, synthetic construct
  misc_feature 1..23: note = Synthetic Polynucleotide
  source 1..23: mol_type = other DNA
caaccygcagtttggtgagatgg

SEQ ID NO: 3215 - DNA, 23 bp, synthetic construct
  misc_feature 1..23: note = Synthetic Polynucleotide
  source 1..23: mol_type = other DNA
cgccaccyaccgccgcctgctgg

SEQ ID NO: 3216 - DNA, 23 bp, synthetic construct
  misc_feature 1..23: note = Synthetic Polynucleotide
  source 1..23: mol_type = other DNA
caccyaccgccgcctgctggagg

SEQ ID NO: 3217 - DNA, 23 bp, synthetic construct
  misc_feature 1..23: note = Synthetic Polynucleotide
  source 1..23: mol_type = other DNA
accyaccgccgcctgctggaggg

SEQ ID NO: 3218 - DNA, 23 bp, synthetic construct
  misc_feature 1..23: note = Synthetic Polynucleotide
  source 1..23: mol_type = other DNA
aagaayatgcccaaaacatctgg

SEQ ID NO: 3219 - DNA, 23 bp, synthetic construct
  misc_feature 1..23: note = Synthetic Polynucleotide
  source 1..23: mol_type = other DNA
ttgaagyctcccgcggtgagcgg

SEQ ID NO: 3220 - DNA, 23 bp, synthetic construct
  misc_feature 1..23: note = Synthetic Polynucleotide
  source 1..23: mol_type = other DNA
aagyctcccgcggtgagcggcgg

SEQ ID NO: 3221 - DNA, 23 bp, synthetic construct
  misc_feature 1..23: note = Synthetic Polynucleotide
  source 1..23: mol_type = other DNA
tttgyggtggagaggggcttcgg

SEQ ID NO: 3222 - DNA, 23 bp, synthetic construct
  misc_feature 1..23: note = Synthetic Polynucleotide
  source 1..23: mol_type = other DNA
ttgyggtggagaggggcttcggg

SEQ ID NO: 3223 - DNA, 23 bp, synthetic construct
  misc_feature 1..23: note = Synthetic Polynucleotide
  source 1..23: mol_type = other DNA
tggtcygagcttcgacttcgtgg

SEQ ID NO: 3224 - DNA, 23 bp, synthetic construct
  misc_feature 1..23: note = Synthetic Polynucleotide
  source 1..23: mol_type = other DNA
gcttgyagatggccatggcgcgg

SEQ ID NO: 3225 - DNA, 23 bp, synthetic construct
  misc_feature 1..23: note = Synthetic Polynucleotide
  source 1..23: mol_type = other DNA
ccacttcytgaaaagtactgtgg

SEQ ID NO: 3226 - DNA, 23 bp, synthetic construct
  misc_feature 1..23: note = Synthetic Polynucleotide
  source 1..23: mol_type = other DNA
cccaygtacctgccgcgccctgg

SEQ ID NO: 3227 - DNA, 23 bp, synthetic construct
  misc_feature 1..23: note = Synthetic Polynucleotide
  source 1..23: mol_type = other DNA
gcaaytgcagaaaatgcaaaagg

SEQ ID NO: 3228 - DNA, 23 bp, synthetic construct
  misc_feature 1..23: note = Synthetic Polynucleotide
  source 1..23: mol_type = other DNA
aagatctygaggcatgacattgg

SEQ ID NO: 3229 - DNA, 23 bp, synthetic construct
  misc_feature 1..23: note = Synthetic Polynucleotide
  source 1..23: mol_type = other DNA
gacycacagagcccaatttctgg

SEQ ID NO: 3230 - DNA, 23 bp, synthetic construct
  misc_feature 1..23: note = Synthetic Polynucleotide
  source 1..23: mol_type = other DNA
agtaygtgaagctccagctgtgg

SEQ ID NO: 3231 - DNA, 23 bp, synthetic construct
  misc_feature 1..23: note = Synthetic Polynucleotide
  source 1..23: mol_type = other DNA
tccccatygtcctcagggatggg

SEQ ID NO: 3232 - DNA, 23 bp, synthetic construct
  misc_feature 1..23: note = Synthetic Polynucleotide
  source 1..23: mol_type = other DNA
agcygggtgcccagtacccttgg

SEQ ID NO: 3233 - DNA, 23 bp, synthetic construct
  misc_feature 1..23: note = Synthetic Polynucleotide
  source 1..23: mol_type = other DNA
caacytactgagggctttgaagg

SEQ ID NO: 3234 - DNA, 23 bp, synthetic construct
  misc_feature 1..23: note = Synthetic Polynucleotide
  source 1..23: mol_type = other DNA
gccttccygcccccccatcaggg

SEQ ID NO: 3235 - DNA, 23 bp, synthetic construct
  misc_feature 1..23: note = Synthetic Polynucleotide
  source 1..23: mol_type = other DNA
acactacyacattgccgctgagg

SEQ ID NO: 3236 - DNA, 23 bp, synthetic construct
  misc_feature 1..23: note = Synthetic Polynucleotide
  source 1..23: mol_type = other DNA
gtgcagayacttggaggcaatgg

SEQ ID NO: 3237 - DNA, 23 bp, synthetic construct
  misc_feature 1..23: note = Synthetic Polynucleotide
  source 1..23: mol_type = other DNA
cagcgaygttcagatactagagg

SEQ ID NO: 3238 - DNA, 23 bp, synthetic construct
  misc_feature 1..23: note = Synthetic Polynucleotide
  source 1..23: mol_type = other DNA
atgggcyaagcgaggagcagagg

SEQ ID NO: 3239 - DNA, 23 bp, synthetic construct
  misc_feature 1..23: note = Synthetic Polynucleotide
  source 1..23: mol_type = other DNA
attacgyccagtcctacaaatgg

SEQ ID NO: 3240 - DNA, 23 bp, synthetic construct
  misc_feature 1..23: note = Synthetic Polynucleotide
  source 1..23: mol_type = other DNA
ttacgyccagtcctacaaatggg

SEQ ID NO: 3241 - DNA, 23 bp, synthetic construct
  misc_feature 1..23: note = Synthetic Polynucleotide
  source 1..23: mol_type = other DNA
tacgyccagtcctacaaatgggg

SEQ ID NO: 3242 - DNA, 23 bp, synthetic construct
  misc_feature 1..23: note = Synthetic Polynucleotide
  source 1..23: mol_type = other DNA
cgcccggyacggcatcgcgtggg

SEQ ID NO: 3243 - DNA, 23 bp, synthetic construct
  misc_feature 1..23: note = Synthetic Polynucleotide
  source 1..23: mol_type = other DNA
gcccggyacggcatcgcgtgggg

SEQ ID NO: 3244 - DNA, 23 bp, synthetic construct
  misc_feature 1..23: note = Synthetic Polynucleotide
  source 1..23: mol_type = other DNA
gtttgccyccttcatcgacaagg

SEQ ID NO: 3245 - DNA, 23 bp, synthetic construct
  misc_feature 1..23: note = Synthetic Polynucleotide
  source 1..23: mol_type = other DNA
aaggacaytcctgtccccaaggg

SEQ ID NO: 3246 - DNA, 23 bp, synthetic construct
  misc_feature 1..23: note = Synthetic Polynucleotide
  source 1..23: mol_type = other DNA
gggccygcggcacctggtggtgg

SEQ ID NO: 3247 - DNA, 23 bp, synthetic construct
  misc_feature 1..23: note = Synthetic Polynucleotide
  source 1..23: mol_type = other DNA
gatgaccytgacctcattgctgg

SEQ ID NO: 3248 - DNA, 23 bp, synthetic construct
  misc_feature 1..23: note = Synthetic Polynucleotide
  source 1..23: mol_type = other DNA
actytgatagagtaaataatagg

SEQ ID NO: 3249 - DNA, 23 bp, synthetic construct
  misc_feature 1..23: note = Synthetic Polynucleotide
  source 1..23: mol_type = other DNA
acttygatagagtaaataatagg

SEQ ID NO: 3250 - DNA, 23 bp, synthetic construct
  misc_feature 1..23: note = Synthetic Polynucleotide
  source 1..23: mol_type = other DNA
ctgyttccctttaggaatctcgg

SEQ ID NO: 3251 - DNA, 23 bp, synthetic construct
  misc_feature 1..23: note = Synthetic Polynucleotide
  source 1..23: mol_type = other DNA
ctcttctygcacagtggaccggg

SEQ ID NO: 3252 - DNA, 23 bp, synthetic construct
  misc_feature 1..23: note = Synthetic Polynucleotide
  source 1..23: mol_type = other DNA
gggacaygttacaacaccgttgg

SEQ ID NO: 3253 - DNA, 23 bp, synthetic construct
  misc_feature 1..23: note = Synthetic Polynucleotide
  source 1..23: mol_type = other DNA
cagctgycctgccagggccgcgg

SEQ ID NO: 3254 - DNA, 23 bp, synthetic construct
  misc_feature 1..23: note = Synthetic Polynucleotide
  source 1..23: mol_type = other DNA
agctgycctgccagggccgcggg

SEQ ID NO: 3255 - DNA, 23 bp, synthetic construct
  misc_feature 1..23: note = Synthetic Polynucleotide
  source 1..23: mol_type = other DNA
gctgycctgccagggccgcgggg

SEQ ID NO: 3256 - DNA, 23 bp, synthetic construct
  misc_feature 1..23: note = Synthetic Polynucleotide
  source 1..23: mol_type = other DNA
ctgycctgccagggccgcggggg

SEQ ID NO: 3257 - DNA, 23 bp, synthetic construct
  misc_feature 1..23: note = Synthetic Polynucleotide
  source 1..23: mol_type = other DNA
cactaytggggtctcggtcaagg

SEQ ID NO: 3258 - DNA, 23 bp, synthetic construct
  misc_feature 1..23: note = Synthetic Polynucleotide
  source 1..23: mol_type = other DNA
cttgygttatgatggattcatgg

SEQ ID NO: 3259 - DNA, 23 bp, synthetic construct
  misc_feature 1..23: note = Synthetic Polynucleotide
  source 1..23: mol_type = other DNA
tgcygtccaaaggcacctactgg

SEQ ID NO: 3260 - DNA, 23 bp, synthetic construct
  misc_feature 1..23: note = Synthetic Polynucleotide
  source 1..23: mol_type = other DNA
ttcgtggyggaagctcctcacgg

SEQ ID NO: 3261 - DNA, 23 bp, synthetic construct
  misc_feature 1..23: note = Synthetic Polynucleotide
  source 1..23: mol_type = other DNA
gaayatataccaaggtatcccgg

SEQ ID NO: 3262 - DNA, 23 bp, synthetic construct
  misc_feature 1..23: note = Synthetic Polynucleotide
  source 1..23: mol_type = other DNA
ttcaccygtatctgtatggcagg

SEQ ID NO: 3263 - DNA, 23 bp, synthetic construct
  misc_feature 1..23: note = Synthetic Polynucleotide
  source 1..23: mol_type = other DNA
accygtatctgtatggcaggtgg

SEQ ID NO: 3264 - DNA, 23 bp, synthetic construct
  misc_feature 1..23: note = Synthetic Polynucleotide
  source 1..23: mol_type = other DNA
gaaygtccccccaacttcaccgg

SEQ ID NO: 3265 - DNA, 23 bp, synthetic construct
  misc_feature 1..23: note = Synthetic Polynucleotide
  source 1..23: mol_type = other DNA
agggyacctggacgaccccacgg

SEQ ID NO: 3266 - DNA, 23 bp, synthetic construct
  misc_feature 1..23: note = Synthetic Polynucleotide
  source 1..23: mol_type = other DNA
tcayggtgagttaaggacagtgg

SEQ ID NO: 3267 - DNA, 23 bp, synthetic construct
  misc_feature 1..23: note = Synthetic Polynucleotide
  source 1..23: mol_type = other DNA
aacagayaatgtcagacaagagg

SEQ ID NO: 3268 - DNA, 23 bp, synthetic construct
  misc_feature 1..23: note = Synthetic Polynucleotide
  source 1..23: mol_type = other DNA
ggaccycgccttccattcggcgg

SEQ ID NO: 3269 - DNA, 23 bp, synthetic construct
  misc_feature 1..23: note = Synthetic Polynucleotide
  source 1..23: mol_type = other DNA
gtccyggaagccattgagccagg

SEQ ID NO: 3270 - DNA, 23 bp, synthetic construct
  misc_feature 1..23: note = Synthetic Polynucleotide
  source 1..23: mol_type = other DNA
agcyaggtggcgacctgctccgg

SEQ ID NO: 3271 - DNA, 23 bp, synthetic construct
  misc_feature 1..23: note = Synthetic Polynucleotide
  source 1..23: mol_type = other DNA
ccctcytcaatgctgccaactgg

SEQ ID NO: 3272 - DNA, 23 bp, synthetic construct
  misc_feature 1..23: note = Synthetic Polynucleotide
  source 1..23: mol_type = other DNA
ttccctgytccgggctggccggg

SEQ ID NO: 3273 - DNA, 23 bp, synthetic construct
  misc_feature 1..23: note = Synthetic Polynucleotide
  source 1..23: mol_type = other DNA
agcccaygccaacaatccactgg

SEQ ID NO: 3274 - DNA, 23 bp, synthetic construct
  misc_feature 1..23: note = Synthetic Polynucleotide
  source 1..23: mol_type = other DNA
tgtgytccttctggtcatcgtgg

SEQ ID NO: 3275 - DNA, 23 bp, synthetic construct
  misc_feature 1..23: note = Synthetic Polynucleotide
  source 1..23: mol_type = other DNA
cacagygggtccctgtctcctgg

SEQ ID NO: 3276 - DNA, 23 bp, synthetic construct
  misc_feature 1..23: note = Synthetic Polynucleotide
  source 1..23: mol_type = other DNA
acagygggtccctgtctcctggg

SEQ ID NO: 3277 - DNA, 23 bp, synthetic construct
  misc_feature 1..23: note = Synthetic Polynucleotide
  source 1..23: mol_type = other DNA
ggcgacycctttgtctttgaagg

SEQ ID NO: 3278 - DNA, 23 bp, synthetic construct
  misc_feature 1..23: note = Synthetic Polynucleotide
  source 1..23: mol_type = other DNA
aatgtacyaccaagaatcaaagg

SEQ ID NO: 3279 - DNA, 23 bp, synthetic construct
  misc_feature 1..23: note = Synthetic Polynucleotide
  source 1..23: mol_type = other DNA
ctggtgcytggggctcctggcgg

SEQ ID NO: 3280 - DNA, 23 bp, synthetic construct
  misc_feature 1..23: note = Synthetic Polynucleotide
  source 1..23: mol_type = other DNA
cgcaygatccacagcaccaatgg

SEQ ID NO: 3281 - DNA, 23 bp, synthetic construct
  misc_feature 1..23: note = Synthetic Polynucleotide
  source 1..23: mol_type = other DNA
gagcccaytgaaatacgctcagg

SEQ ID NO: 3282 - DNA, 23 bp, synthetic construct
  misc_feature 1..23: note = Synthetic Polynucleotide
  source 1..23: mol_type = other DNA
gggattgytgttcatgaattggg

SEQ ID NO: 3283 - DNA, 23 bp, synthetic construct
  misc_feature 1..23: note = Synthetic Polynucleotide
  source 1..23: mol_type = other DNA
attgacycagtcggattcaatgg

SEQ ID NO: 3284 - DNA, 23 bp, synthetic construct
  misc_feature 1..23: note = Synthetic Polynucleotide
  source 1..23: mol_type = other DNA
tgcggcygaggtaggtggtctgg

SEQ ID NO: 3285 - DNA, 23 bp, synthetic construct
  misc_feature 1..23: note = Synthetic Polynucleotide
  source 1..23: mol_type = other DNA
gcggcygaggtaggtggtctggg

SEQ ID NO: 3286 - DNA, 23 bp, synthetic construct
  misc_feature 1..23: note = Synthetic Polynucleotide
  source 1..23: mol_type = other DNA
gacttctyggccctggatcttgg

SEQ ID NO: 3287 - DNA, 23 bp, synthetic construct
  misc_feature 1..23: note = Synthetic Polynucleotide
  source 1..23: mol_type = other DNA
ttctyggccctggatcttggagg

SEQ ID NO: 3288 - DNA, 23 bp, synthetic construct
  misc_feature 1..23: note = Synthetic Polynucleotide
  source 1..23: mol_type = other DNA
agcyccagaagcctttcttttgg

SEQ ID NO: 3289 - DNA, 23 bp, synthetic construct
  misc_feature 1..23: note = Synthetic Polynucleotide
  source 1..23: mol_type = other DNA
tggagygcattgagtagggccgg

SEQ ID NO: 3290 - DNA, 23 bp, synthetic construct
  misc_feature 1..23: note = Synthetic Polynucleotide
  source 1..23: mol_type = other DNA
cacgagtytcttactgagaatgg

SEQ ID NO: 3291 - DNA, 23 bp, synthetic construct
  misc_feature 1..23: note = Synthetic Polynucleotide
  source 1..23: mol_type = other DNA
gagtytcttactgagaatggagg

SEQ ID NO: 3292 - DNA, 23 bp, synthetic construct
  misc_feature 1..23: note = Synthetic Polynucleotide
  source 1..23: mol_type = other DNA
cttcaggygagggctggggtggg

SEQ ID NO: 3293 - DNA, 23 bp, synthetic construct
  misc_feature 1..23: note = Synthetic Polynucleotide
  source 1..23: mol_type = other DNA
aggygagggctggggtgggcagg

SEQ ID NO: 3294 - DNA, 23 bp, synthetic construct
  misc_feature 1..23: note = Synthetic Polynucleotide
  source 1..23: mol_type = other DNA
ggaccygctcaatgtcaagctgg

SEQ ID NO: 3295 - DNA, 23 bp, synthetic construct
  misc_feature 1..23: note = Synthetic Polynucleotide
  source 1..23: mol_type = other DNA
taccaggygtccctgaattctgg

SEQ ID NO: 3296 - DNA, 23 bp, synthetic construct
  misc_feature 1..23: note = Synthetic Polynucleotide
  source 1..23: mol_type = other DNA
aaagaayctgtagatcaaagagg

SEQ ID NO: 3297 - DNA, 23 bp, synthetic construct
  misc_feature 1..23: note = Synthetic Polynucleotide
  source 1..23: mol_type = other DNA
atcatytggaacagtctacaagg

SEQ ID NO: 3298 - DNA, 23 bp, synthetic construct
  misc_feature 1..23: note = Synthetic Polynucleotide
  source 1..23: mol_type = other DNA
tcatytggaacagtctacaaggg

SEQ ID NO: 3299 - DNA, 23 bp, synthetic construct
  misc_feature 1..23: note = Synthetic Polynucleotide
  source 1..23: mol_type = other DNA
acgaacaycttcctcaaatttgg

SEQ ID NO: 3300 - DNA, 23 bp, synthetic construct
  misc_feature 1..23: note = Synthetic Polynucleotide
  source 1..23: mol_type = other DNA
gacgtyctctgagaggacgctgg

SEQ ID NO: 3301 - DNA, 23 bp, synthetic construct
  misc_feature 1..23: note = Synthetic Polynucleotide
  source 1..23: mol_type = other DNA
gaagcyggaggcgcaggtgcagg

SEQ ID NO: 3302 - DNA, 23 bp, synthetic construct
  misc_feature 1..23: note = Synthetic Polynucleotide
  source 1..23: mol_type = other DNA
caagaggytggtgatctgcaagg

SEQ ID NO: 3303 - DNA, 23 bp, synthetic construct
  misc_feature 1..23: note = Synthetic Polynucleotide
  source 1..23: mol_type = other DNA
caaaccyatatccgcagagttgg

SEQ ID NO: 3304 - DNA, 23 bp, synthetic construct
  misc_feature 1..23: note = Synthetic Polynucleotide
  source 1..23: mol_type = other DNA
tggccttycctggccccaggtgg

SEQ ID NO: 3305 - DNA, 23 bp, synthetic construct
  misc_feature 1..23: note = Synthetic Polynucleotide
  source 1..23: mol_type = other DNA
ggccttycctggccccaggtggg

SEQ ID NO: 3306 - DNA, 23 bp, synthetic construct
  misc_feature 1..23: note = Synthetic Polynucleotide
  source 1..23: mol_type = other DNA
agaytggtgtgcgcaacatccgg

SEQ ID NO: 3307 - DNA, 23 bp, synthetic construct
  misc_feature 1..23: note = Synthetic Polynucleotide
  source 1..23: mol_type = other DNA
gacttcaytgaggaccagggtgg

SEQ ID NO: 3308 - DNA, 23 bp, synthetic construct
  misc_feature 1..23: note = Synthetic Polynucleotide
  source 1..23: mol_type = other DNA
acttcaytgaggaccagggtggg

SEQ ID NO: 3309 - DNA, 23 bp, synthetic construct
  misc_feature 1..23: note = Synthetic Polynucleotide
  source 1..23: mol_type = other DNA
cttcygggccgggaccgtgatgg

SEQ ID NO: 3310 - DNA, 23 bp, synthetic construct
  misc_feature 1..23: note = Synthetic Polynucleotide
  source 1..23: mol_type = other DNA
ttcygggccgggaccgtgatggg

SEQ ID NO: 3311 - DNA, 23 bp, synthetic construct
  misc_feature 1..23: note = Synthetic Polynucleotide
  source 1..23: mol_type = other DNA
atcytagggtaaggtgacttagg

SEQ ID NO: 3312 - DNA, 23 bp, synthetic construct
  misc_feature 1..23: note = Synthetic Polynucleotide
  source 1..23: mol_type = other DNA
cagccygatccccatcactgtgg

SEQ ID NO: 3313 - DNA, 23 bp, synthetic construct
  misc_feature 1..23: note = Synthetic Polynucleotide
  source 1..23: mol_type = other DNA
gccyctaccctgggctcatctgg

SEQ ID NO: 3314 - DNA, 23 bp, synthetic construct
  misc_feature 1..23: note = Synthetic Polynucleotide
  source 1..23: mol_type = other DNA
tctcacygctagaaaagacttgg

SEQ ID NO: 3315 - DNA, 23 bp, synthetic construct
  misc_feature 1..23: note = Synthetic Polynucleotide
  source 1..23: mol_type = other DNA
gggcagygtacttgccgcactgg

SEQ ID NO: 3316 - DNA, 23 bp, synthetic construct
  misc_feature 1..23: note = Synthetic Polynucleotide
  source 1..23: mol_type = other DNA
cctgtgygtcccccaggggcagg

SEQ ID NO: 3317 - DNA, 23 bp, synthetic construct
  misc_feature 1..23: note = Synthetic Polynucleotide
  source 1..23: mol_type = other DNA
ctgtgygtcccccaggggcaggg

SEQ ID NO: 3318 - DNA, 23 bp, synthetic construct
  misc_feature 1..23: note = Synthetic Polynucleotide
  source 1..23: mol_type = other DNA
tgtgygtcccccaggggcagggg

SEQ ID NO: 3319 - DNA, 23 bp, synthetic construct
  misc_feature 1..23: note = Synthetic Polynucleotide
  source 1..23: mol_type = other DNA
gtgygtcccccaggggcaggggg

SEQ ID NO: 3320 - DNA, 23 bp, synthetic construct
  misc_feature 1..23: note = Synthetic Polynucleotide
  source 1..23: mol_type = other DNA
gagtyctttgcccttttgagagg

SEQ ID NO: 3321 - DNA, 23 bp, synthetic construct
  misc_feature 1..23: note = Synthetic Polynucleotide
  source 1..23: mol_type = other DNA
ccgccgcyattaccccggccagg

SEQ ID NO: 3322 - DNA, 23 bp, synthetic construct
  misc_feature 1..23: note = Synthetic Polynucleotide
  source 1..23: mol_type = other DNA
cgccgcyattaccccggccaggg

SEQ ID NO: 3323 - DNA, 23 bp, synthetic construct
  misc_feature 1..23: note = Synthetic Polynucleotide
  source 1..23: mol_type = other DNA
agaytgtggatccgctggcccgg

SEQ ID NO: 3324 - DNA, 23 bp, synthetic construct
  misc_feature 1..23: note = Synthetic Polynucleotide
  source 1..23: mol_type = other DNA
aaaattygcaagtatgtcttagg

SEQ ID NO: 3325 - DNA, 23 bp, synthetic construct
  misc_feature 1..23: note = Synthetic Polynucleotide
  source 1..23: mol_type = other DNA
aaattygcaagtatgtcttaggg

SEQ ID NO: 3326 - DNA, 23 bp, synthetic construct
  misc_feature 1..23: note = Synthetic Polynucleotide
  source 1..23: mol_type = other DNA
ccaaaacycacctttcctggtgg

SEQ ID NO: 3327 - DNA, 23 bp, synthetic construct
  misc_feature 1..23: note = Synthetic Polynucleotide
  source 1..23: mol_type = other DNA
ggaccagyacatgaggactgggg

SEQ ID NO: 3328 - DNA, 23 bp, synthetic construct
  misc_feature 1..23: note = Synthetic Polynucleotide
  source 1..23: mol_type = other DNA
ccagyacatgaggactggggagg

SEQ ID NO: 3329 - DNA, 23 bp, synthetic construct
  misc_feature 1..23: note = Synthetic Polynucleotide
  source 1..23: mol_type = other DNA
cagyacatgaggactggggaggg

SEQ ID NO: 3330 - DNA, 23 bp, synthetic construct
  misc_feature 1..23: note = Synthetic Polynucleotide
  source 1..23: mol_type = other DNA
cagcagcygcaggagcacctggg

SEQ ID NO: 3331 - DNA, 23 bp, synthetic construct
  misc_feature 1..23: note = Synthetic Polynucleotide
  source 1..23: mol_type = other DNA
tgccatcycactggcgtacgagg

SEQ ID NO: 3332 - DNA, 23 bp, synthetic construct
  misc_feature 1..23: note = Synthetic Polynucleotide
  source 1..23: mol_type = other DNA
aggacyctgagccaggggcccgg

SEQ ID NO: 3333 - DNA, 23 bp, synthetic construct
  misc_feature 1..23: note = Synthetic Polynucleotide
  source 1..23: mol_type = other DNA
ggccgcygcccaacgccatccgg

SEQ ID NO: 3334 - DNA, 23 bp, synthetic construct
  misc_feature 1..23: note = Synthetic Polynucleotide
  source 1..23: mol_type = other DNA
acayagtacaggattcctgcggg

SEQ ID NO: 3335 - DNA, 23 bp, synthetic construct
  misc_feature 1..23: note = Synthetic Polynucleotide
  source 1..23: mol_type = other DNA
gacayagtacaggattcctgcgg

SEQ ID NO: 3336 - DNA, 23 bp, synthetic construct
  misc_feature 1..23: note = Synthetic Polynucleotide
  source 1..23: mol_type = other DNA
ctgatyttcagcctccttttggg

SEQ ID NO: 3337 - DNA, 23 bp, synthetic construct
  misc_feature 1..23: note = Synthetic Polynucleotide
  source 1..23: mol_type = other DNA
gctgatyttcagcctccttttgg

SEQ ID NO: 3338 - DNA, 23 bp, synthetic construct
  misc_feature 1..23: note = Synthetic Polynucleotide
  source 1..23: mol_type = other DNA
tggaagytatcgatgaccacagg

SEQ ID NO: 3339 - DNA, 23 bp, synthetic construct
  misc_feature 1..23: note = Synthetic Polynucleotide
  source 1..23: mol_type = other DNA
gtcaytgaggttctgcatggtgg

SEQ ID NO: 3340 - DNA, 23 bp, synthetic construct
  misc_feature 1..23: note = Synthetic Polynucleotide
  source 1..23: mol_type = other DNA
gatggyagttaatgagctcaggg

SEQ ID NO: 3341 - DNA, 23 bp, synthetic construct
  misc_feature 1..23: note = Synthetic Polynucleotide
  source 1..23: mol_type = other DNA
tgatggyagttaatgagctcagg

SEQ ID NO: 3342 - DNA, 23 bp, synthetic construct
  misc_feature 1..23: note = Synthetic Polynucleotide
  source 1..23: mol_type = other DNA
tcatagtyctgcagaggagaggg

SEQ ID NO: 3343 - DNA, 23 bp, synthetic construct
  misc_feature 1..23: note = Synthetic Polynucleotide
  source 1..23: mol_type = other DNA
cagytgaatttgtgtgtaaacgg

SEQ ID NO: 3344 - DNA, 23 bp, synthetic construct
  misc_feature 1..23: note = Synthetic Polynucleotide
  source 1..23: mol_type = other DNA
agcattgycttcccattcccagg

SEQ ID NO: 3345 - DNA, 23 bp, synthetic construct
  misc_feature 1..23: note = Synthetic Polynucleotide
  source 1..23: mol_type = other DNA
ccggygaggccctggggcggggg

SEQ ID NO: 3346 - DNA, 23 bp, synthetic construct
  misc_feature 1..23: note = Synthetic Polynucleotide
  source 1..23: mol_type = other DNA
tccggygaggccctggggcgggg

SEQ ID NO: 3347 - DNA, 23 bp, synthetic construct
  misc_feature 1..23: note = Synthetic Polynucleotide
  source 1..23: mol_type = other DNA
attgaaayagagtaacaagaagg

SEQ ID NO: 3348 - DNA, 23 bp, synthetic construct
  misc_feature 1..23: note = Synthetic Polynucleotide
  source 1..23: mol_type = other DNA
gctgtyggccgccggctccgcgg

SEQ ID NO: 3349 - DNA, 23 bp, synthetic construct
  misc_feature 1..23: note = Synthetic Polynucleotide
  source 1..23: mol_type = other DNA
cgaaaygtgtatctcctcccagg

SEQ ID NO: 3350 - DNA, 23 bp, synthetic construct
  misc_feature 1..23: note = Synthetic Polynucleotide
  source 1..23: mol_type = other DNA
gccagagygagtggctggagtgg

SEQ ID NO: 3351 - DNA, 23 bp, synthetic construct
  misc_feature 1..23: note = Synthetic Polynucleotide
  source 1..23: mol_type = other DNA
aactyggtcctgcgggatggggg

SEQ ID NO: 3352 - DNA, 23 bp, synthetic construct
  misc_feature 1..23: note = Synthetic Polynucleotide
  source 1..23: mol_type = other DNA
gccaggyggaagtcatagagcgg

SEQ ID NO: 3353 - DNA, 23 bp, synthetic construct
  misc_feature 1..23: note = Synthetic Polynucleotide
  source 1..23: mol_type = other DNA
tccaytgtggcccaggaaggagg

SEQ ID NO: 3354 - DNA, 23 bp, synthetic construct
  misc_feature 1..23: note = Synthetic Polynucleotide
  source 1..23: mol_type = other DNA
caggtggyacacgaagtcctggg

SEQ ID NO: 3355 - DNA, 23 bp, synthetic construct
  misc_feature 1..23: note = Synthetic Polynucleotide
  source 1..23: mol_type = other DNA
gaaataygatggggcgctcaggg

SEQ ID NO: 3356 - DNA, 23 bp, synthetic construct
  misc_feature 1..23: note = Synthetic Polynucleotide
  source 1..23: mol_type = other DNA
agaaataygatggggcgctcagg

SEQ ID NO: 3357 - DNA, 23 bp, synthetic construct
  misc_feature 1..23: note = Synthetic Polynucleotide
  source 1..23: mol_type = other DNA
gacayggtagatgatcagcgggg

SEQ ID NO: 3358 - DNA, 23 bp, synthetic construct
  misc_feature 1..23: note = Synthetic Polynucleotide
  source 1..23: mol_type = other DNA
taaytgtgcccatggccatttgg

SEQ ID NO: 3359 - DNA, 23 bp, synthetic construct
  misc_feature 1..23: note = Synthetic Polynucleotide
  source 1..23: mol_type = other DNA
cccygaaggtggaggatgcaggg

SEQ ID NO: 3360 - DNA, 23 bp, synthetic construct
  misc_feature 1..23: note = Synthetic Polynucleotide
  source 1..23: mol_type = other DNA
ccaytggtcttgagccaagtggg

SEQ ID NO: 3361 - DNA, 23 bp, synthetic construct
  misc_feature 1..23: note = Synthetic Polynucleotide
  source 1..23: mol_type = other DNA
tccaytggtcttgagccaagtgg

SEQ ID NO: 3362 - DNA, 23 bp, synthetic construct
  misc_feature 1..23: note = Synthetic Polynucleotide
  source 1..23: mol_type = other DNA
acatayatccctctggacattgg

SEQ ID NO: 3363 - DNA, 23 bp, synthetic construct
  misc_feature 1..23: note = Synthetic Polynucleotide
  source 1..23: mol_type = other DNA
ctcytgatgttgttgtgagctgg

SEQ ID NO: 3364 - DNA, 23 bp, synthetic construct
  misc_feature 1..23: note = Synthetic Polynucleotide
  source 1..23: mol_type = other DNA
tgtgttygcgcagggagctcggg

SEQ ID NO: 3365 - DNA, 23 bp, synthetic construct
  misc_feature 1..23: note = Synthetic Polynucleotide
  source 1..23: mol_type = other DNA
atgtgttygcgcagggagctcgg

SEQ ID NO: 3366 - DNA, 23 bp, synthetic construct
  misc_feature 1..23: note = Synthetic Polynucleotide
  source 1..23: mol_type = other DNA
ccggtgayccagggggtctatgg

SEQ ID NO: 3367 - DNA, 23 bp, synthetic construct
  misc_feature 1..23: note = Synthetic Polynucleotide
  source 1..23: mol_type = other DNA
tggyaagttctcccctcaacagg

SEQ ID NO: 3368 - DNA, 23 bp, synthetic construct
  misc_feature 1..23: note = Synthetic Polynucleotide
  source 1..23: mol_type = other DNA
tgagyatgcataagcgacgaagg

SEQ ID NO: 3369 - DNA, 23 bp, synthetic construct
  misc_feature 1..23: note = Synthetic Polynucleotide
  source 1..23: mol_type = other DNA
tgagtaygcataagcgacgaagg

SEQ ID NO: 3370 - DNA, 23 bp, synthetic construct
  misc_feature 1..23: note = Synthetic Polynucleotide
  source 1..23: mol_type = other DNA
tctggytgatactcaagtccagg

SEQ ID NO: 3371 - DNA, 23 bp, synthetic construct
  misc_feature 1..23: note = Synthetic Polynucleotide
  source 1..23: mol_type = other DNA
tgcggagyggacgggcagcgtgg

SEQ ID NO: 3372 - DNA, 23 bp, synthetic construct
  misc_feature 1..23: note = Synthetic Polynucleotide
  source 1..23: mol_type = other DNA
aaatgyttcctgtacacctgtgg

SEQ ID NO: 3373 - DNA, 23 bp, synthetic construct
  misc_feature 1..23: note = Synthetic Polynucleotide
  source 1..23: mol_type = other DNA
agaggytgtgtttacggtagcgg

SEQ ID NO: 3374 - DNA, 23 bp, synthetic construct
  misc_feature 1..23: note = Synthetic Polynucleotide
  source 1..23: mol_type = other DNA
tctygatggccacgtcgtactgg

SEQ ID NO: 3375 - DNA, 23 bp, synthetic construct
  misc_feature 1..23: note = Synthetic Polynucleotide
  source 1..23: mol_type = other DNA
aagyagattttctgccaggtggg

SEQ ID NO: 3376 - DNA, 23 bp, synthetic construct
  misc_feature 1..23: note = Synthetic Polynucleotide
  source 1..23: mol_type = other DNA
gaagyagattttctgccaggtgg

SEQ ID NO: 3377 - DNA, 23 bp, synthetic construct
  misc_feature 1..23: note = Synthetic Polynucleotide
  source 1..23: mol_type = other DNA
gtagaagyagattttctgccagg

SEQ ID NO: 3378 - DNA, 23 bp, synthetic construct
  misc_feature 1..23: note = Synthetic Polynucleotide
  source 1..23: mol_type = other DNA
aaaaygtgttggtgcttgagggg

SEQ ID NO: 3379 - DNA, 23 bp, synthetic construct
  misc_feature 1..23: note = Synthetic Polynucleotide
  source 1..23: mol_type = other DNA
gaaaaygtgttggtgcttgaggg

SEQ ID NO: 3380 - DNA, 23 bp, synthetic construct
  misc_feature 1..23: note = Synthetic Polynucleotide
  source 1..23: mol_type = other DNA
agaaaaygtgttggtgcttgagg

SEQ ID NO: 3381 - DNA, 23 bp, synthetic construct
  misc_feature 1..23: note = Synthetic Polynucleotide
  source 1..23: mol_type = other DNA
tgtagyaggtgaagatgatcagg

SEQ ID NO: 3382 - DNA, 23 bp, synthetic construct
  misc_feature 1..23: note = Synthetic Polynucleotide
  source 1..23: mol_type = other DNA
tcaytgataagcagggcccaggg

SEQ ID NO: 3383 - DNA, 23 bp, synthetic construct
  misc_feature 1..23: note = Synthetic Polynucleotide
  source 1..23: mol_type = other DNA
ttcaytgataagcagggcccagg

SEQ ID NO: 3384 - DNA, 23 bp, synthetic construct
  misc_feature 1..23: note = Synthetic Polynucleotide
  source 1..23: mol_type = other DNA
acatgyagcaggcgcagtagggg

SEQ ID NO: 3385 - DNA, 23 bp, synthetic construct
  misc_feature 1..23: note = Synthetic Polynucleotide
  source 1..23: mol_type = other DNA
gacatgyagcaggcgcagtaggg

SEQ ID NO: 3386 - DNA, 23 bp, synthetic construct
  misc_feature 1..23: note = Synthetic Polynucleotide
  source 1..23: mol_type = other DNA
ctcaygatctgggatctcagagg

SEQ ID NO: 3387 - DNA, 23 bp, synthetic construct
  misc_feature 1..23: note = Synthetic Polynucleotide
  source 1..23: mol_type = other DNA
agctgtgygatgaagcaggcagg

SEQ ID NO: 3388 - DNA, 23 bp, synthetic construct
  misc_feature 1..23: note = Synthetic Polynucleotide
  source 1..23: mol_type = other DNA
gtgtgtayagatgtccagaaggg

SEQ ID NO: 3389 - DNA, 23 bp, synthetic construct
  misc_feature 1..23: note = Synthetic Polynucleotide
  source 1..23: mol_type = other DNA
tgctgaytggaaaccgtgagtgg

SEQ ID NO: 3390 - DNA, 23 bp, synthetic construct
  misc_feature 1..23: note = Synthetic Polynucleotide
  source 1..23: mol_type = other DNA
tccyaaaaggcacgggatgaagg

SEQ ID NO: 3391 - DNA, 23 bp, synthetic construct
  misc_feature 1..23: note = Synthetic Polynucleotide
  source 1..23: mol_type = other DNA
atagtgtycctaaaaggcacggg

SEQ ID NO: 3392 - DNA, 23 bp, synthetic construct
  misc_feature 1..23: note = Synthetic Polynucleotide
  source 1..23: mol_type = other DNA
agaygagggtctcagccctgcgg

SEQ ID NO: 3393 - DNA, 23 bp, synthetic construct
  misc_feature 1..23: note = Synthetic Polynucleotide
  source 1..23: mol_type = other DNA
cttayagatctcatcaatgttgg

SEQ ID NO: 3394 - DNA, 23 bp, synthetic construct
  misc_feature 1..23: note = Synthetic Polynucleotide
  source 1..23: mol_type = other DNA
atcyaaagcaaaagacaagcagg

SEQ ID NO: 3395 - DNA, 23 bp, synthetic construct
  misc_feature 1..23: note = Synthetic Polynucleotide
  source 1..23: mol_type = other DNA
tccyagtaagaaacagaatatgg

SEQ ID NO: 3396 - DNA, 23 bp, synthetic construct
  misc_feature 1..23: note = Synthetic Polynucleotide
  source 1..23: mol_type = other DNA
caaygaagaggaattgcccctgg

SEQ ID NO: 3397 - DNA, 23 bp, synthetic construct
  misc_feature 1..23: note = Synthetic Polynucleotide
  source 1..23: mol_type = other DNA
gtagyaggcccaagcccgacagg

SEQ ID NO: 3398 - DNA, 23 bp, synthetic construct
  misc_feature 1..23: note = Synthetic Polynucleotide
  source 1..23: mol_type = other DNA
gtaagtgytgaccaaattaccgg

SEQ ID NO: 3399 - DNA, 23 bp, synthetic construct
  misc_feature 1..23: note = Synthetic Polynucleotide
  source 1..23: mol_type = other DNA
ggtgttgytggaatggagaatgg

SEQ ID NO: 3400 - DNA, 23 bp, synthetic construct
  misc_feature 1..23: note = Synthetic Polynucleotide
  source 1..23: mol_type = other DNA
cactgytgacgaaggtagcaggg

SEQ ID NO: 3401 - DNA, 23 bp, synthetic construct
  misc_feature 1..23: note = Synthetic Polynucleotide
  source 1..23: mol_type = other DNA
ctcayggttggttggcaagaagg

SEQ ID NO: 3402 - DNA, 23 bp, synthetic construct
  misc_feature 1..23: note = Synthetic Polynucleotide
  source 1..23: mol_type = other DNA
agctggaycgaggccttaaaagg

SEQ ID NO: 3403 - DNA, 23 bp, synthetic construct
  misc_feature 1..23: note = Synthetic Polynucleotide
  source 1..23: mol_type = other DNA
actytttgggatcgacttcctgg

SEQ ID NO: 3404 - DNA, 23 bp, synthetic construct
  misc_feature 1..23: note = Synthetic Polynucleotide
  source 1..23: mol_type = other DNA
aaatatgyggtcacactttgtgg

SEQ ID NO: 3405 - DNA, 23 bp, synthetic construct
  misc_feature 1..23: note = Synthetic Polynucleotide
  source 1..23: mol_type = other DNA
acgytgagctggggctgcgcggg

SEQ ID NO: 3406 - DNA, 23 bp, synthetic construct
  misc_feature 1..23: note = Synthetic Polynucleotide
  source 1..23: mol_type = other DNA
cacgytgagctggggctgcgcgg

SEQ ID NO: 3407 - DNA, 23 bp, synthetic construct
  misc_feature 1..23: note = Synthetic Polynucleotide
  source 1..23: mol_type = other DNA
gccaayggtaacgggcctttggg

SEQ ID NO: 3408 - DNA, 23 bp, synthetic construct
  misc_feature 1..23: note = Synthetic Polynucleotide
  source 1..23: mol_type = other DNA
tccayagatgaagttattgcagg

SEQ ID NO: 3409 - DNA, 23 bp, synthetic construct
  misc_feature 1..23: note = Synthetic Polynucleotide
  source 1..23: mol_type = other DNA
cagyggtacagggtgaccacggg

SEQ ID NO: 3410 - DNA, 23 bp, synthetic construct
  misc_feature 1..23: note = Synthetic Polynucleotide
  source 1..23: mol_type = other DNA
ccagyggtacagggtgaccacgg

SEQ ID NO: 3411 - DNA, 23 bp, synthetic construct
  misc_feature 1..23: note = Synthetic Polynucleotide
  source 1..23: mol_type = other DNA
tggyagaggcccctggggtcagg

SEQ ID NO: 3412 - DNA, 23 bp, synthetic construct
  misc_feature 1..23: note = Synthetic Polynucleotide
  source 1..23: mol_type = other DNA
tgayggaggggatggcgcctagg

SEQ ID NO: 3413 - DNA, 23 bp, synthetic construct
  misc_feature 1..23: note = Synthetic Polynucleotide
  source 1..23: mol_type = other DNA
ccayagaagcccacgatgtacgg

SEQ ID NO: 3414 - DNA, 23 bp, synthetic construct
  misc_feature 1..23: note = Synthetic Polynucleotide
  source 1..23: mol_type = other DNA
agcttytttgtagacaggcatgg

SEQ ID NO: 3415 - DNA, 23 bp, synthetic construct
  misc_feature 1..23: note = Synthetic Polynucleotide
  source 1..23: mol_type = other DNA
cacataayacgaactggtgctgg

SEQ ID NO: 3416 - DNA, 23 bp, synthetic construct
  misc_feature 1..23: note = Synthetic Polynucleotide
  source 1..23: mol_type = other DNA
accgtygtggcccagcaggacgg

SEQ ID NO: 3417 - DNA, 23 bp, synthetic construct
  misc_feature 1..23: note = Synthetic Polynucleotide
  source 1..23: mol_type = other DNA
cgcygaagatgaggcagaccagg

SEQ ID NO: 3418 - DNA, 23 bp, synthetic construct
  misc_feature 1..23: note = Synthetic Polynucleotide
  source 1..23: mol_type = other DNA
gcggytggccttgggattgaggg

SEQ ID NO: 3419 - DNA, 23 bp, synthetic construct
  misc_feature 1..23: note = Synthetic Polynucleotide
  source 1..23: mol_type = other DNA
cgcggytggccttgggattgagg

SEQ ID NO: 3420 - DNA, 23 bp, synthetic construct
  misc_feature 1..23: note = Synthetic Polynucleotide
  source 1..23: mol_type = other DNA
ctgyggatgcactggggtgcggg

SEQ ID NO: 3421 - DNA, 23 bp, synthetic construct
  misc_feature 1..23: note = Synthetic Polynucleotide
  source 1..23: mol_type = other DNA
tctgyggatgcactggggtgcgg

SEQ ID NO: 3422 - DNA, 23 bp, synthetic construct
  misc_feature 1..23: note = Synthetic Polynucleotide
  source 1..23: mol_type = other DNA
gtcayagttctggcacgttttgg

SEQ ID NO: 3423 - DNA, 23 bp, synthetic construct
  misc_feature 1..23: note = Synthetic Polynucleotide
  source 1..23: mol_type = other DNA
atayagttttcagggcccggagg

SEQ ID NO: 3424 - DNA, 23 bp, synthetic construct
  misc_feature 1..23: note = Synthetic Polynucleotide
  source 1..23: mol_type = other DNA
ctgatayagttttcagggcccgg

SEQ ID NO: 3425 - DNA, 23 bp, synthetic construct
  misc_feature 1..23: note = Synthetic Polynucleotide
  source 1..23: mol_type = other DNA
cgaygttgaagagggcaggcagg

SEQ ID NO: 3426 - DNA, 23 bp, synthetic construct
  misc_feature 1..23: note = Synthetic Polynucleotide
  source 1..23: mol_type = other DNA
tgaggyaatcagccaggatctgg

SEQ ID NO: 3427 - DNA, 23 bp, synthetic construct
  misc_feature 1..23: note = Synthetic Polynucleotide
  source 1..23: mol_type = other DNA
gcagtggyaggtgatgttctggg

SEQ ID NO: 3428 - DNA, 23 bp, synthetic construct
  misc_feature 1..23: note = Synthetic Polynucleotide
  source 1..23: mol_type = other DNA
acttyattcaaagaccaggaagg

SEQ ID NO: 3429 - DNA, 23 bp, synthetic construct
  misc_feature 1..23: note = Synthetic Polynucleotide
  source 1..23: mol_type = other DNA
cgtggytggggaagggcagctgg

SEQ ID NO: 3430 - DNA, 23 bp, synthetic construct
  misc_feature 1..23: note = Synthetic Polynucleotide
  source 1..23: mol_type = other DNA
gacttygagttcagacatgaggg

SEQ ID NO: 3431 - DNA, 23 bp, synthetic construct
  misc_feature 1..23: note = Synthetic Polynucleotide
  source 1..23: mol_type = other DNA
ggcatagyggaagatctatgagg

SEQ ID NO: 3432 - DNA, 23 bp, synthetic construct
  misc_feature 1..23: note = Synthetic Polynucleotide
  source 1..23: mol_type = other DNA
accygagatgcaaaatagggagg

SEQ ID NO: 3433 - DNA, 23 bp, synthetic construct
  misc_feature 1..23: note = Synthetic Polynucleotide
  source 1..23: mol_type = other DNA
ggctgytgttggccagcagaagg

SEQ ID NO: 3434 - DNA, 23 bp, synthetic construct
  misc_feature 1..23: note = Synthetic Polynucleotide
  source 1..23: mol_type = other DNA
tgcgaytgcagaagatgacctgg

SEQ ID NO: 3435 - DNA, 23 bp, synthetic construct
  misc_feature 1..23: note = Synthetic Polynucleotide
  source 1..23: mol_type = other DNA
aacyagagtaatagcgggtcagg

SEQ ID NO: 3436 - DNA, 23 bp, synthetic construct
  misc_feature 1..23: note = Synthetic Polynucleotide
  source 1..23: mol_type = other DNA
ctataytgttcatcccctctggg

SEQ ID NO: 3437 - DNA, 23 bp, synthetic construct
  misc_feature 1..23: note = Synthetic Polynucleotide
  source 1..23: mol_type = other DNA
actataytgttcatcccctctgg

SEQ ID NO: 3438 - DNA, 23 bp, synthetic construct
  misc_feature 1..23: note = Synthetic Polynucleotide
  source 1..23: mol_type = other DNA
gcatgyttgctccaacacagagg

SEQ ID NO: 3439 - DNA, 23 bp, synthetic construct
  misc_feature 1..23: note = Synthetic Polynucleotide
  source 1..23: mol_type = other DNA
cggytgaactctcagtcttctgg

SEQ ID NO: 3440 - DNA, 23 bp, synthetic construct
  misc_feature 1..23: note = Synthetic Polynucleotide
  source 1..23: mol_type = other DNA
ggcaagygcatcaacacgctggg

SEQ ID NO: 3441 - DNA, 23 bp, synthetic construct
  misc_feature 1..23: note = Synthetic Polynucleotide
  source 1..23: mol_type = other DNA
ttcygtaaaacataaaagtcagg

SEQ ID NO: 3442 - DNA, 23 bp, synthetic construct
  misc_feature 1..23: note = Synthetic Polynucleotide
  source 1..23: mol_type = other DNA
caagtygttagctgccaacaagg

SEQ ID NO: 3443 - DNA, 23 bp, synthetic construct
  misc_feature 1..23: note = Synthetic Polynucleotide
  source 1..23: mol_type = other DNA
agggytggagtaggggccatcgg

SEQ ID NO: 3444 - DNA, 23 bp, synthetic construct
  misc_feature 1..23: note = Synthetic Polynucleotide
  source 1..23: mol_type = other DNA
aataaagyagaatatcgtcaagg

SEQ ID NO: 3445 - DNA, 23 bp, synthetic construct
  misc_feature 1..23: note = Synthetic Polynucleotide
  source 1..23: mol_type = other DNA
cacaytgacacatgtggccaggg

SEQ ID NO: 3446 - DNA, 23 bp, synthetic construct
  misc_feature 1..23: note = Synthetic Polynucleotide
  source 1..23: mol_type = other DNA
ggagyaggggctcagcagggcgg

SEQ ID NO: 3447 - DNA, 23 bp, synthetic construct
  misc_feature 1..23: note = Synthetic Polynucleotide
  source 1..23: mol_type = other DNA
ataggagyaggggctcagcaggg

SEQ ID NO: 3448 - DNA, 23 bp, synthetic construct
  misc_feature 1..23: note = Synthetic Polynucleotide
  source 1..23: mol_type = other DNA
gacatytggagggtccccgatgg

SEQ ID NO: 3449 - DNA, 23 bp, synthetic construct
  misc_feature 1..23: note = Synthetic Polynucleotide
  source 1..23: mol_type = other DNA
ctgaagytggtctgacctcaggg

SEQ ID NO: 3450 - DNA, 23 bp, synthetic construct
  misc_feature 1..23: note = Synthetic Polynucleotide
  source 1..23: mol_type = other DNA
gctgaagytggtctgacctcagg

SEQ ID NO: 3451 - DNA, 23 bp, synthetic construct
  misc_feature 1..23: note = Synthetic Polynucleotide
  source 1..23: mol_type = other DNA
tgctygatccactggatgtgggg

SEQ ID NO: 3452 - DNA, 23 bp, synthetic construct
  misc_feature 1..23: note = Synthetic Polynucleotide
  source 1..23: mol_type = other DNA
gataggyacatatcaaaccaggg

SEQ ID NO: 3453 - DNA, 23 bp, synthetic construct
  misc_feature 1..23: note = Synthetic Polynucleotide
  source 1..23: mol_type = other DNA
agataggyacatatcaaaccagg

SEQ ID NO: 3454 - DNA, 23 bp, synthetic construct
  misc_feature 1..23: note = Synthetic Polynucleotide
  source 1..23: mol_type = other DNA
ccaagaytaccaccacctggtgg

SEQ ID NO: 3455 - DNA, 23 bp, synthetic construct
  misc_feature 1..23: note = Synthetic Polynucleotide
  source 1..23: mol_type = other DNA
atagatgycagcacgtttgaagg

SEQ ID NO: 3456 - DNA, 23 bp, synthetic construct
  misc_feature 1..23: note = Synthetic Polynucleotide
  source 1..23: mol_type = other DNA
accygagagggagggcagccagg

SEQ ID NO: 3457 - DNA, 23 bp, synthetic construct
  misc_feature 1..23: note = Synthetic Polynucleotide
  source 1..23: mol_type = other DNA
gccygaaaacacagccacagagg

SEQ ID NO: 3458 - DNA, 23 bp, synthetic construct
  misc_feature 1..23: note = Synthetic Polynucleotide
  source 1..23: mol_type = other DNA
ccaygttgtcaatgtccagctgg

SEQ ID NO: 3459 - DNA, 23 bp, synthetic construct
  misc_feature 1..23: note = Synthetic Polynucleotide
  source 1..23: mol_type = other DNA
cacygagggaaagcactgcaggg

SEQ ID NO: 3460 - DNA, 23 bp, synthetic construct
  misc_feature 1..23: note = Synthetic Polynucleotide
  source 1..23: mol_type = other DNA
cagyagagcttgcggcgccgggg

SEQ ID NO: 3461 - DNA, 23 bp, synthetic construct
  misc_feature 1..23: note = Synthetic Polynucleotide
  source 1..23: mol_type = other DNA
gcagyagagcttgcggcgccggg

SEQ ID NO: 3462 - DNA, 23 bp, synthetic construct
  misc_feature 1..23: note = Synthetic Polynucleotide
  source 1..23: mol_type = other DNA
cgcagyagagcttgcggcgccgg

SEQ ID NO: 3463 - DNA, 23 bp, synthetic construct
  misc_feature 1..23: note = Synthetic Polynucleotide
  source 1..23: mol_type = other DNA
ctcyagggccgcaggttggaggg

SEQ ID NO: 3464 - DNA, 23 bp, synthetic construct
  misc_feature 1..23: note = Synthetic Polynucleotide
  source 1..23: mol_type = other DNA
cgcggytgagggtgtagaagtgg

SEQ ID NO: 3465 - DNA, 23 bp, synthetic construct
  misc_feature 1..23: note = Synthetic Polynucleotide
  source 1..23: mol_type = other DNA
aatggatyctgaatgtacagagg

SEQ ID NO: 3466 - DNA, 23 bp, synthetic construct
  misc_feature 1..23: note = Synthetic Polynucleotide
  source 1..23: mol_type = other DNA
acagtyttaggacatcattgtgg

SEQ ID NO: 3467 - DNA, 23 bp, synthetic construct
  misc_feature 1..23: note = Synthetic Polynucleotide
  source 1..23: mol_type = other DNA
ttaagttytatgcgattaccggg

SEQ ID NO: 3468 - DNA, 23 bp, synthetic construct
  misc_feature 1..23: note = Synthetic Polynucleotide
  source 1..23: mol_type = other DNA
gaatgtaygataatgaacggagg

SEQ ID NO: 3469 - DNA, 23 bp, synthetic construct
  misc_feature 1..23: note = Synthetic Polynucleotide
  source 1..23: mol_type = other DNA
tggttyggcatcatagtgctggg

SEQ ID NO: 3470 - DNA, 23 bp, synthetic construct
  misc_feature 1..23: note = Synthetic Polynucleotide
  source 1..23: mol_type = other DNA
gtggttyggcatcatagtgctgg

SEQ ID NO: 3471 - DNA, 23 bp, synthetic construct
  misc_feature 1..23: note = Synthetic Polynucleotide
  source 1..23: mol_type = other DNA
acayaggtgcgacggccccaggg

SEQ ID NO: 3472 - DNA, 23 bp, synthetic construct
  misc_feature 1..23: note = Synthetic Polynucleotide
  source 1..23: mol_type = other DNA
gacayaggtgcgacggccccagg

SEQ ID NO: 3473 - DNA, 23 bp, synthetic construct
  misc_feature 1..23: note = Synthetic Polynucleotide
  source 1..23: mol_type = other DNA
acayatatccctctggacattgg

SEQ ID NO: 3474 - DNA, 23 bp, synthetic construct
  misc_feature 1..23: note = Synthetic Polynucleotide
  source 1..23: mol_type = other DNA
cgaggyggtggtggtccaagtgg

SEQ ID NO: 3475 - DNA, 23 bp, synthetic construct
  misc_feature 1..23: note = Synthetic Polynucleotide
  source 1..23: mol_type = other DNA
gagataytcacaattacaactgg

SEQ ID NO: 3476 - DNA, 23 bp, synthetic construct
  misc_feature 1..23: note = Synthetic Polynucleotide
  source 1..23: mol_type = other DNA
aggtgagyaatctgtcagcaggg

SEQ ID NO: 3477 - DNA, 23 bp, synthetic construct
  misc_feature 1..23: note = Synthetic Polynucleotide
  source 1..23: mol_type = other DNA
tacygtgggcagagaaggggagg

SEQ ID NO: 3478 - DNA, 23 bp, synthetic construct
  misc_feature 1..23: note = Synthetic Polynucleotide
  source 1..23: mol_type = other DNA
gcaggtyaccatctcctggaggg

SEQ ID NO: 3479 - DNA, 23 bp, synthetic construct
  misc_feature 1..23: note = Synthetic Polynucleotide
  source 1..23: mol_type = other DNA
tgcaggtyaccatctcctggagg

SEQ ID NO: 3480 - DNA, 23 bp, synthetic construct
  misc_feature 1..23: note = Synthetic Polynucleotide
  source 1..23: mol_type = other DNA
tggagtygcaccaaaatttttgg

SEQ ID NO: 3481 - DNA, 23 bp, synthetic construct
  misc_feature 1..23: note = Synthetic Polynucleotide
  source 1..23: mol_type = other DNA
acayatttcttaggtttgagggg

SEQ ID NO: 3482 - DNA, 23 bp, synthetic construct
  misc_feature 1..23: note = Synthetic Polynucleotide
  source 1..23: mol_type = other DNA
gacayatttcttaggtttgaggg

SEQ ID NO: 3483 - DNA, 23 bp, synthetic construct
  misc_feature 1..23: note = Synthetic Polynucleotide
  source 1..23: mol_type = other DNA
atgytggaggcttggaactctgg

SEQ ID NO: 3484 - DNA, 23 bp, synthetic construct
  misc_feature 1..23: note = Synthetic Polynucleotide
  source 1..23: mol_type = other DNA
caaygatgagcttgaagatgagg

SEQ ID NO: 3485 - DNA, 23 bp, synthetic construct
  misc_feature 1..23: note = Synthetic Polynucleotide
  source 1..23: mol_type = other DNA
ttgytaataaaagttagaaacgg

SEQ ID NO: 3486 - DNA, 23 bp, synthetic construct
  misc_feature 1..23: note = Synthetic Polynucleotide
  source 1..23: mol_type = other DNA
ggttayggtgccgttaagtttgg

SEQ ID NO: 3487 - DNA, 23 bp, synthetic construct
  misc_feature 1..23: note = Synthetic Polynucleotide
  source 1..23: mol_type = other DNA
accygtgaagggaacagagatgg

SEQ ID NO: 3488 - DNA, 23 bp, synthetic construct
  misc_feature 1..23: note = Synthetic Polynucleotide
  source 1..23: mol_type = other DNA
tctttaytgtttaagccaacagg

SEQ ID NO: 3489 - DNA, 23 bp, synthetic construct
  misc_feature 1..23: note = Synthetic Polynucleotide
  source 1..23: mol_type = other DNA
tgcagyagccgcccttctgccgg

SEQ ID NO: 3490 - DNA, 23 bp, synthetic construct
  misc_feature 1..23: note = Synthetic Polynucleotide
  source 1..23: mol_type = other DNA
cgcyttgaaaaaaaaagaaaggg

SEQ ID NO: 3491 - DNA, 23 bp, synthetic construct
  misc_feature 1..23: note = Synthetic Polynucleotide
  source 1..23: mol_type = other DNA
gattayatctgtagccttcgggg

SEQ ID NO: 3492 - DNA, 23 bp, synthetic construct
  misc_feature 1..23: note = Synthetic Polynucleotide
  source 1..23: mol_type = other DNA
agattayatctgtagccttcggg

SEQ ID NO: 3493 - DNA, 23 bp, synthetic construct
  misc_feature 1..23: note = Synthetic Polynucleotide
  source 1..23: mol_type = other DNA
gagattayatctgtagccttcgg

SEQ ID NO: 3494 - DNA, 23 bp, synthetic construct
  misc_feature 1..23: note = Synthetic Polynucleotide
  source 1..23: mol_type = other DNA
ttcagygtattgctttgaggagg

SEQ ID NO: 3495 - DNA, 23 bp, synthetic construct
  misc_feature 1..23: note = Synthetic Polynucleotide
  source 1..23: mol_type = other DNA
gtayagaggtattgttcttttgg

SEQ ID NO: 3496 - DNA, 23 bp, synthetic construct
  misc_feature 1..23: note = Synthetic Polynucleotide
  source 1..23: mol_type = other DNA
agggaytgcctacaaacaccagg

SEQ ID NO: 3497 - DNA, 23 bp, synthetic construct
  misc_feature 1..23: note = Synthetic Polynucleotide
  source 1..23: mol_type = other DNA
gaagtaayaggtgaccccagggg

SEQ ID NO: 3498 - DNA, 23 bp, synthetic construct
  misc_feature 1..23: note = Synthetic Polynucleotide
  source 1..23: mol_type = other DNA
gcaggyagagatgaccgctgtgg

SEQ ID NO: 3499 - DNA, 23 bp, synthetic construct
  misc_feature 1..23: note = Synthetic Polynucleotide
  source 1..23: mol_type = other DNA
gacaygaagggagatgctgaggg

SEQ ID NO: 3500 - DNA, 23 bp, synthetic construct
  misc_feature 1..23: note = Synthetic Polynucleotide
  source 1..23: mol_type = other DNA
acttayagcttcttgtctccagg

SEQ ID NO: 3501 - DNA, 23 bp, synthetic construct
  misc_feature 1..23: note = Synthetic Polynucleotide
  source 1..23: mol_type = other DNA
tgcayggtctctcgggcgctggg

SEQ ID NO: 3502 - DNA, 23 bp, synthetic construct
  misc_feature 1..23: note = Synthetic Polynucleotide
  source 1..23: mol_type = other DNA
tgcacytgccgtgggtgcagagg

SEQ ID NO: 3503 - DNA, 23 bp, synthetic construct
  misc_feature 1..23: note = Synthetic Polynucleotide
  source 1..23: mol_type = other DNA
agcgcycctcagcatctgccagg

SEQ ID NO: 3504 - DNA, 23 bp, synthetic construct
  misc_feature 1..23: note = Synthetic Polynucleotide
  source 1..23: mol_type = other DNA
accacygggggtaaaaaaagggg

SEQ ID NO: 3505 - DNA, 23 bp, synthetic construct
  misc_feature 1..23: note = Synthetic Polynucleotide
  source 1..23: mol_type = other DNA
taccacygggggtaaaaaaaggg

SEQ ID NO: 3506 - DNA, 23 bp, synthetic construct
  misc_feature 1..23: note = Synthetic Polynucleotide
  source 1..23: mol_type = other DNA
ataccacygggggtaaaaaaagg

SEQ ID NO: 3507 - DNA, 23 bp, synthetic construct
  misc_feature 1..23: note = Synthetic Polynucleotide
  source 1..23: mol_type = other DNA
acayagtacaggattcctgcggg

SEQ ID NO: 3508 - DNA, 23 bp, synthetic construct
  misc_feature 1..23: note = Synthetic Polynucleotide
  source 1..23: mol_type = other DNA
gacayagtacaggattcctgcgg

SEQ ID NO: 3509 - DNA, 23 bp, synthetic construct
  misc_feature 1..23: note = Synthetic Polynucleotide
  source 1..23: mol_type = other DNA
tgatyttcagcctccttttgggg

SEQ ID NO: 3510 - DNA, 23 bp, synthetic construct
  misc_feature 1..23: note = Synthetic Polynucleotide
  source 1..23: mol_type = other DNA
ctgatyttcagcctccttttggg

SEQ ID NO: 3511 - DNA, 23 bp, synthetic construct
  misc_feature 1..23: note = Synthetic Polynucleotide
  source 1..23: mol_type = other DNA
gctgatyttcagcctccttttgg

SEQ ID NO: 3512 - DNA, 23 bp, synthetic construct
  misc_feature 1..23: note = Synthetic Polynucleotide
  source 1..23: mol_type = other DNA
ccctyctcggagccctgtagagg

SEQ ID NO: 3513 - DNA, 23 bp, synthetic construct
  misc_feature 1..23: note = Synthetic Polynucleotide
  source 1..23: mol_type = other DNA
tggaagytatcgatgaccacagg

SEQ ID NO: 3514 - DNA, 23 bp, synthetic construct
  misc_feature 1..23: note = Synthetic Polynucleotide
  source 1..23: mol_type = other DNA
gtcaytgaggttctgcatggtgg

SEQ ID NO: 3515 - DNA, 23 bp, synthetic construct
  misc_feature 1..23: note = Synthetic Polynucleotide
  source 1..23: mol_type = other DNA
gcggtcaytgaggttctgcatgg

SEQ ID NO: 3516 - DNA, 23 bp, synthetic construct
  misc_feature 1..23: note = Synthetic Polynucleotide
  source 1..23: mol_type = other DNA
gatggyagttaatgagctcaggg

SEQ ID NO: 3517 - DNA, 23 bp, synthetic construct
  misc_feature 1..23: note = Synthetic Polynucleotide
  source 1..23: mol_type = other DNA
tgatggyagttaatgagctcagg

SEQ ID NO: 3518 - DNA, 23 bp, synthetic construct
  misc_feature 1..23: note = Synthetic Polynucleotide
  source 1..23: mol_type = other DNA
catagtyctgcagaggagagggg

SEQ ID NO: 3519 - DNA, 23 bp, synthetic construct
  misc_feature 1..23: note = Synthetic Polynucleotide
  source 1..23: mol_type = other DNA
tcatagtyctgcagaggagaggg

SEQ ID NO: 3520 - DNA, 23 bp, synthetic construct
  misc_feature 1..23: note = Synthetic Polynucleotide
  source 1..23: mol_type = other DNA
cagytgaatttgtgtgtaaacgg

SEQ ID NO: 3521 - DNA, 23 bp, synthetic construct
  misc_feature 1..23: note = Synthetic Polynucleotide
  source 1..23: mol_type = other DNA
attgycttcccattcccaggtgg

SEQ ID NO: 3522 - DNA, 23 bp, synthetic construct
  misc_feature 1..23: note = Synthetic Polynucleotide
  source 1..23: mol_type = other DNA
agcattgycttcccattcccagg

SEQ ID NO: 3523 - DNA, 23 bp, synthetic construct
  misc_feature 1..23: note = Synthetic Polynucleotide
  source 1..23: mol_type = other DNA
ttcycctccacgctctcgcctgg

SEQ ID NO: 3524 - DNA, 23 bp, synthetic construct
  misc_feature 1..23: note = Synthetic Polynucleotide
  source 1..23: mol_type = other DNA
gcccctyggagcccacgcagagg

SEQ ID NO: 3525 - DNA, 23 bp, synthetic construct
  misc_feature 1..23: note = Synthetic Polynucleotide
  source 1..23: mol_type = other DNA
ccggygaggccctggggcggggg

SEQ ID NO: 3526 - DNA, 23 bp, synthetic construct
  misc_feature 1..23: note = Synthetic Polynucleotide
  source 1..23: mol_type = other DNA
tccggygaggccctggggcgggg

SEQ ID NO: 3527 - DNA, 23 bp, synthetic construct
  misc_feature 1..23: note = Synthetic Polynucleotide
  source 1..23: mol_type = other DNA
atccggygaggccctggggcggg

SEQ ID NO: 3528 - DNA, 23 bp, synthetic construct
  misc_feature 1..23: note = Synthetic Polynucleotide
  source 1..23: mol_type = other DNA
gatccggygaggccctggggcgg

SEQ ID NO: 3529 - DNA, 23 bp, synthetic construct
  misc_feature 1..23: note = Synthetic Polynucleotide
  source 1..23: mol_type = other DNA
attgaaayagagtaacaagaagg

SEQ ID NO: 3530 - DNA, 23 bp, synthetic construct
  misc_feature 1..23: note = Synthetic Polynucleotide
  source 1..23: mol_type = other DNA
gctgtyggccgccggctccgcgg

SEQ ID NO: 3531 - DNA, 23 bp, synthetic construct
  misc_feature 1..23: note = Synthetic Polynucleotide
  source 1..23: mol_type = other DNA
cgaaaygtgtatctcctcccagg

SEQ ID NO: 3532 - DNA, 23 bp, synthetic construct
  misc_feature 1..23: note = Synthetic Polynucleotide
  source 1..23: mol_type = other DNA
gccagagygagtggctggagtgg

SEQ ID NO: 3533 - DNA, 23 bp, synthetic construct
  misc_feature 1..23: note = Synthetic Polynucleotide
  source 1..23: mol_type = other DNA
aactyggtcctgcgggatggggg

SEQ ID NO: 3534 - DNA, 23 bp, synthetic construct
  misc_feature 1..23: note = Synthetic Polynucleotide
  source 1..23: mol_type = other DNA
gaactyggtcctgcgggatgggg

SEQ ID NO: 3535 - DNA, 23 bp, synthetic construct
  misc_feature 1..23: note = Synthetic Polynucleotide
  source 1..23: mol_type = other DNA
ggaactyggtcctgcgggatggg

SEQ ID NO: 3536 - DNA, 23 bp, synthetic construct
  misc_feature 1..23: note = Synthetic Polynucleotide
  source 1..23: mol_type = other DNA
aggaactyggtcctgcgggatgg

SEQ ID NO: 3537 - DNA, 23 bp, synthetic construct
  misc_feature 1..23: note = Synthetic Polynucleotide
  source 1..23: mol_type = other DNA
gccaggyggaagtcatagagcgg

SEQ ID NO: 3538 - DNA, 23 bp, synthetic construct
  misc_feature 1..23: note = Synthetic Polynucleotide
  source 1..23: mol_type = other DNA
ttctcyaaaagcttctgataagg

SEQ ID NO: 3539 - DNA, 23 bp, synthetic construct
  misc_feature 1..23: note = Synthetic Polynucleotide
  source 1..23: mol_type = other DNA
attgycgtcgtcgtcgtcgcagg

SEQ ID NO: 3540 - DNA, 23 bp, synthetic construct
  misc_feature 1..23: note = Synthetic Polynucleotide
  source 1..23: mol_type = other DNA
gtacygtaaggaagattctcggg

SEQ ID NO: 3541 - DNA, 23 bp, synthetic construct
  misc_feature 1..23: note = Synthetic Polynucleotide
  source 1..23: mol_type = other DNA
ggtacygtaaggaagattctcgg

SEQ ID NO: 3542 - DNA, 23 bp, synthetic construct
  misc_feature 1..23: note = Synthetic Polynucleotide
  source 1..23: mol_type = other DNA
tccyggtctgaccattccccagg

SEQ ID NO: 3543 - DNA, 23 bp, synthetic construct
  misc_feature 1..23: note = Synthetic Polynucleotide
  source 1..23: mol_type = other DNA
actcaycaatatctgcaaaatgg

SEQ ID NO: 3544 - DNA, 23 bp, synthetic construct
  misc_feature 1..23: note = Synthetic Polynucleotide
  source 1..23: mol_type = other DNA
gaatagyccatcgcagagcaagg

SEQ ID NO: 3545 - DNA, 23 bp, synthetic construct
  misc_feature 1..23: note = Synthetic Polynucleotide
  source 1..23: mol_type = other DNA
agtccacytggggaggaaggtgg

SEQ ID NO: 3546 - DNA, 23 bp, synthetic construct
  misc_feature 1..23: note = Synthetic Polynucleotide
  source 1..23: mol_type = other DNA
attcacaytcttcaacttaatgg

SEQ ID NO: 3547 - DNA, 23 bp, synthetic construct
  misc_feature 1..23: note = Synthetic Polynucleotide
  source 1..23: mol_type = other DNA
tgttcayactggaagccggcggg

SEQ ID NO: 3548 - DNA, 23 bp, synthetic construct
  misc_feature 1..23: note = Synthetic Polynucleotide
  source 1..23: mol_type = other DNA
ctgttcayactggaagccggcgg

SEQ ID NO: 3549 - DNA, 23 bp, synthetic construct
  misc_feature 1..23: note = Synthetic Polynucleotide
  source 1..23: mol_type = other DNA
tccaytgtggcccaggaaggagg

SEQ ID NO: 3550 - DNA, 23 bp, synthetic construct
  misc_feature 1..23: note = Synthetic Polynucleotide
  source 1..23: mol_type = other DNA
cgctccaytgtggcccaggaagg

SEQ ID NO: 3551 - DNA, 23 bp, synthetic construct
  misc_feature 1..23: note = Synthetic Polynucleotide
  source 1..23: mol_type = other DNA
gcaytgaccaccacctcaagtgg

SEQ ID NO: 3552 - DNA, 23 bp, synthetic construct
  misc_feature 1..23: note = Synthetic Polynucleotide
  source 1..23: mol_type = other DNA
cggagyccttccacagccgctgg

SEQ ID NO: 3553 - DNA, 23 bp, synthetic construct
  misc_feature 1..23: note = Synthetic Polynucleotide
  source 1..23: mol_type = other DNA
ggatgyacctgaggacaggcagg

SEQ ID NO: 3554 - DNA, 23 bp, synthetic construct
  misc_feature 1..23: note = Synthetic Polynucleotide
  source 1..23: mol_type = other DNA
gacacygaggtgctgagtacggg

SEQ ID NO: 3555 - DNA, 23 bp, synthetic construct
  misc_feature 1..23: note = Synthetic Polynucleotide
  source 1..23: mol_type = other DNA
cgacacygaggtgctgagtacgg

SEQ ID NO: 3556 - DNA, 23 bp, synthetic construct
  misc_feature 1..23: note = Synthetic Polynucleotide
  source 1..23: mol_type = other DNA
tgccgyacccgatcatacctggg

SEQ ID NO: 3557 - DNA, 23 bp, synthetic construct
  misc_feature 1..23: note = Synthetic Polynucleotide
  source 1..23: mol_type = other DNA
atgccgyacccgatcatacctgg

SEQ ID NO: 3558 - DNA, 23 bp, synthetic construct
  misc_feature 1..23: note = Synthetic Polynucleotide
  source 1..23: mol_type = other DNA
gacayacccctgggtggtggagg

SEQ ID NO: 3559 - DNA, 23 bp, synthetic construct
  misc_feature 1..23: note = Synthetic Polynucleotide
  source 1..23: mol_type = other DNA
gcggacayacccctgggtggtgg

SEQ ID NO: 3560 - DNA, 23 bp, synthetic construct
  misc_feature 1..23: note = Synthetic Polynucleotide
  source 1..23: mol_type = other DNA
gtagyagcaggagatcatcgtgg

SEQ ID NO: 3561 - DNA, 23 bp, synthetic construct
  misc_feature 1..23: note = Synthetic Polynucleotide
  source 1..23: mol_type = other DNA
atatytgcatgttttctccaagg

SEQ ID NO: 3562 - DNA, 23 bp, synthetic construct
  misc_feature 1..23: note = Synthetic Polynucleotide
  source 1..23: mol_type = other DNA
caggtggyacacgaagtcctggg

SEQ ID NO: 3563 - DNA, 23 bp, synthetic construct
  misc_feature 1..23: note = Synthetic Polynucleotide
  source 1..23: mol_type = other DNA
ccaygtcagtctctgtcctccgg

SEQ ID NO: 3564 - DNA, 23 bp, synthetic construct
  misc_feature 1..23: note = Synthetic Polynucleotide
  source 1..23: mol_type = other DNA
ctccygagggcttaggattgggg

SEQ ID NO: 3565 - DNA, 23 bp, synthetic construct
  misc_feature 1..23: note = Synthetic Polynucleotide
  source 1..23: mol_type = other DNA
cctccygagggcttaggattggg

SEQ ID NO: 3566 - DNA, 23 bp, synthetic construct
  misc_feature 1..23: note = Synthetic Polynucleotide
  source 1..23: mol_type = other DNA
acctccygagggcttaggattgg

SEQ ID NO: 3567 - DNA, 23 bp, synthetic construct
  misc_feature 1..23: note = Synthetic Polynucleotide
  source 1..23: mol_type = other DNA
tcctacayagtggtactcagagg

SEQ ID NO: 3568 - DNA, 23 bp, synthetic construct
  misc_feature 1..23: note = Synthetic Polynucleotide
  source 1..23: mol_type = other DNA
gaaataygatggggcgctcaggg

SEQ ID NO: 3569 - DNA, 23 bp, synthetic construct
  misc_feature 1..23: note = Synthetic Polynucleotide
  source 1..23: mol_type = other DNA
agaaataygatggggcgctcagg

SEQ ID NO: 3570 - DNA, 23 bp, synthetic construct
  misc_feature 1..23: note = Synthetic Polynucleotide
  source 1..23: mol_type = other DNA
gacayggtagatgatcagcgggg

SEQ ID NO: 3571 - DNA, 23 bp, synthetic construct
  misc_feature 1..23: note = Synthetic Polynucleotide
  source 1..23: mol_type = other DNA
tgacayggtagatgatcagcggg

SEQ ID NO: 3572 - DNA, 23 bp, synthetic construct
  misc_feature 1..23: note = Synthetic Polynucleotide
  source 1..23: mol_type = other DNA
atgacayggtagatgatcagcgg

SEQ ID NO: 3573 - DNA, 23 bp, synthetic construct
  misc_feature 1..23: note = Synthetic Polynucleotide
  source 1..23: mol_type = other DNA
taaytgtgcccatggccatttgg

SEQ ID NO: 3574 - DNA, 23 bp, synthetic construct
  misc_feature 1..23: note = Synthetic Polynucleotide
  source 1..23: mol_type = other DNA
ctgyactggcagagggattctgg

SEQ ID NO: 3575 - DNA, 23 bp, synthetic construct
  misc_feature 1..23: note = Synthetic Polynucleotide
  source 1..23: mol_type = other DNA
gcgyttccacgatgaagaagggg

SEQ ID NO: 3576 - DNA, 23 bp, synthetic construct
  misc_feature 1..23: note = Synthetic Polynucleotide
  source 1..23: mol_type = other DNA
agcgyttccacgatgaagaaggg

SEQ ID NO: 3577 - DNA, 23 bp, synthetic construct
  misc_feature 1..23: note = Synthetic Polynucleotide
  source 1..23: mol_type = other DNA
cagcgyttccacgatgaagaagg

SEQ ID NO: 3578 - DNA, 23 bp, synthetic construct
  misc_feature 1..23: note = Synthetic Polynucleotide
  source 1..23: mol_type = other DNA
agttgtcycaatacctgctttgg

SEQ ID NO: 3579 - DNA, 23 bp, synthetic construct
  misc_feature 1..23: note = Synthetic Polynucleotide
  source 1..23: mol_type = other DNA
atayctccaacctcaaacttggg

SEQ ID NO: 3580 - DNA, 23 bp, synthetic construct
  misc_feature 1..23: note = Synthetic Polynucleotide
  source 1..23: mol_type = other DNA
gatayctccaacctcaaacttgg

SEQ ID NO: 3581 - DNA, 23 bp, synthetic construct
  misc_feature 1..23: note = Synthetic Polynucleotide
  source 1..23: mol_type = other DNA
ggcactycttggcatagcgacgg

SEQ ID NO: 3582 - DNA, 23 bp, synthetic construct
  misc_feature 1..23: note = Synthetic Polynucleotide
  source 1..23: mol_type = other DNA
gcggtcaytgaggttctgcatgg

SEQ ID NO: 3583 - DNA, 23 bp, synthetic construct
  misc_feature 1..23: note = Synthetic Polynucleotide
  source 1..23: mol_type = other DNA
ctgctgcygtcgtcgtcgcttgg

SEQ ID NO: 3584 - DNA, 23 bp, synthetic construct
  misc_feature 1..23: note = Synthetic Polynucleotide
  source 1..23: mol_type = other DNA
cctycttcacctgcttgaggtgg

SEQ ID NO: 3585 - DNA, 23 bp, synthetic construct
  misc_feature 1..23: note = Synthetic Polynucleotide
  source 1..23: mol_type = other DNA
cctcctycttcacctgcttgagg

SEQ ID NO: 3586 - DNA, 23 bp, synthetic construct
  misc_feature 1..23: note = Synthetic Polynucleotide
  source 1..23: mol_type = other DNA
cccygaaggtggaggatgcaggg

SEQ ID NO: 3587 - DNA, 23 bp, synthetic construct
  misc_feature 1..23: note = Synthetic Polynucleotide
  source 1..23: mol_type = other DNA
gcccygaaggtggaggatgcagg

SEQ ID NO: 3588 - DNA, 23 bp, synthetic construct
  misc_feature 1..23: note = Synthetic Polynucleotide
  source 1..23: mol_type = other DNA
gtcctgyccctccgccacagtgg

SEQ ID NO: 3589 - DNA, 23 bp, synthetic construct
  misc_feature 1..23: note = Synthetic Polynucleotide
  source 1..23: mol_type = other DNA
ccaytggtcttgagccaagtggg

SEQ ID NO: 3590 - DNA, 23 bp, synthetic construct
  misc_feature 1..23: note = Synthetic Polynucleotide
  source 1..23: mol_type = other DNA
tccaytggtcttgagccaagtgg

SEQ ID NO: 3591 - DNA, 23 bp, synthetic construct
  misc_feature 1..23: note = Synthetic Polynucleotide
  source 1..23: mol_type = other DNA
gtgccayacctggtgtggggagg

SEQ ID NO: 3592 - DNA, 23 bp, synthetic construct
  misc_feature 1..23: note = Synthetic Polynucleotide
  source 1..23: mol_type = other DNA
aaagactyttcccaccgacatgg

SEQ ID NO: 3593 - DNA, 23 bp, synthetic construct
  misc_feature 1..23: note = Synthetic Polynucleotide
  source 1..23: mol_type = other DNA
tggygcctcatgcagcgtcgagg

SEQ ID NO: 3594 - DNA, 23 bp, synthetic construct
  misc_feature 1..23: note = Synthetic Polynucleotide
  source 1..23: mol_type = other DNA
acatayatccctctggacattgg

SEQ ID NO: 3595 - DNA, 23 bp, synthetic construct
  misc_feature 1..23: note = Synthetic Polynucleotide
  source 1..23: mol_type = other DNA
ctcytgatgttgttgtgagctgg

SEQ ID NO: 3596 - DNA, 23 bp, synthetic construct
  misc_feature 1..23: note = Synthetic Polynucleotide
  source 1..23: mol_type = other DNA
tgtgttygcgcagggagctcggg

SEQ ID NO: 3597 - DNA, 23 bp, synthetic construct
  misc_feature 1..23: note = Synthetic Polynucleotide
  source 1..23: mol_type = other DNA
atgtgttygcgcagggagctcgg

SEQ ID NO: 3598 - DNA, 23 bp, synthetic construct
  misc_feature 1..23: note = Synthetic Polynucleotide
  source 1..23: mol_type = other DNA
aagcycttaatatctgtgcatgg

SEQ ID NO: 3599 - DNA, 23 bp, synthetic construct
  misc_feature 1..23: note = Synthetic Polynucleotide
  source 1..23: mol_type = other DNA
taaacygcagagagaaccaaggg

SEQ ID NO: 3600 - DNA, 23 bp, synthetic construct
  misc_feature 1..23: note = Synthetic Polynucleotide
  source 1..23: mol_type = other DNA
gtaaacygcagagagaaccaagg

SEQ ID NO: 3601 - DNA, 23 bp, synthetic construct
  misc_feature 1..23: note = Synthetic Polynucleotide
  source 1..23: mol_type = other DNA
cccacayatccatctgcctgcgg

SEQ ID NO: 3602 - DNA, 23 bp, synthetic construct
  misc_feature 1..23: note = Synthetic Polynucleotide
  source 1..23: mol_type = other DNA
tgayccagggggtctatgggagg

SEQ ID NO: 3603 - DNA, 23 bp, synthetic construct
  misc_feature 1..23: note = Synthetic Polynucleotide
  source 1..23: mol_type = other DNA
cggtgayccagggggtctatggg

SEQ ID NO: 3604 - DNA, 23 bp, synthetic construct
  misc_feature 1..23: note = Synthetic Polynucleotide
  source 1..23: mol_type = other DNA
ccggtgayccagggggtctatgg

SEQ ID NO: 3605 - DNA, 23 bp, synthetic construct
  misc_feature 1..23: note = Synthetic Polynucleotide
  source 1..23: mol_type = other DNA
cacccaycttcttcacccctcgg

SEQ ID NO: 3606 - DNA, 23 bp, synthetic construct
  misc_feature 1..23: note = Synthetic Polynucleotide
  source 1..23: mol_type = other DNA
tggyaagttctcccctcaacagg

SEQ ID NO: 3607 - DNA, 23 bp, synthetic construct
  misc_feature 1..23: note = Synthetic Polynucleotide
  source 1..23: mol_type = other DNA
tgagyatgcataagcgacgaagg

SEQ ID NO: 3608 - DNA, 23 bp, synthetic construct
  misc_feature 1..23: note = Synthetic Polynucleotide
  source 1..23: mol_type = other DNA
tgagtaygcataagcgacgaagg

SEQ ID NO: 3609 - DNA, 23 bp, synthetic construct
  misc_feature 1..23: note = Synthetic Polynucleotide
  source 1..23: mol_type = other DNA
atccattycaaagtaagcaatgg

SEQ ID NO: 3610 - DNA, 23 bp, synthetic construct
  misc_feature 1..23: note = Synthetic Polynucleotide
  source 1..23: mol_type = other DNA
tctggytgatactcaagtccagg

SEQ ID NO: 3611 - DNA, 23 bp, synthetic construct
  misc_feature 1..23: note = Synthetic Polynucleotide
  source 1..23: mol_type = other DNA
gggccyggcccgcacgtcacagg

SEQ ID NO: 3612 - DNA, 23 bp, synthetic construct
  misc_feature 1..23: note = Synthetic Polynucleotide
  source 1..23: mol_type = other DNA
tgcggagyggacgggcagcgtgg

SEQ ID NO: 3613 - DNA, 23 bp, synthetic construct
  misc_feature 1..23: note = Synthetic Polynucleotide
  source 1..23: mol_type = other DNA
cgtcygtacgtgggcggcctggg

SEQ ID NO: 3614 - DNA, 23 bp, synthetic construct
  misc_feature 1..23: note = Synthetic Polynucleotide
  source 1..23: mol_type = other DNA
gcgtcygtacgtgggcggcctgg

SEQ ID NO: 3615 - DNA, 23 bp, synthetic construct
  misc_feature 1..23: note = Synthetic Polynucleotide
  source 1..23: mol_type = other DNA
aaatgyttcctgtacacctgtgg

SEQ ID NO: 3616 - DNA, 23 bp, synthetic construct
  misc_feature 1..23: note = Synthetic Polynucleotide
  source 1..23: mol_type = other DNA
cgcccygcggccgagagggcggg

SEQ ID NO: 3617 - DNA, 23 bp, synthetic construct
  misc_feature 1..23: note = Synthetic Polynucleotide
  source 1..23: mol_type = other DNA
gcgcccygcggccgagagggcgg

SEQ ID NO: 3618 - DNA, 23 bp, synthetic construct
  misc_feature 1..23: note = Synthetic Polynucleotide
  source 1..23: mol_type = other DNA
gttcayagatgtcaaggttctgg

SEQ ID NO: 3619 - DNA, 23 bp, synthetic construct
  misc_feature 1..23: note = Synthetic Polynucleotide
  source 1..23: mol_type = other DNA
agaggytgtgtttacggtagcgg

SEQ ID NO: 3620 - DNA, 23 bp, synthetic construct
  misc_feature 1..23: note = Synthetic Polynucleotide
  source 1..23: mol_type = other DNA
tctygatggccacgtcgtactgg

SEQ ID NO: 3621 - DNA, 23 bp, synthetic construct
  misc_feature 1..23: note = Synthetic Polynucleotide
  source 1..23: mol_type = other DNA
ggcayacagctctttggataagg

SEQ ID NO: 3622 - DNA, 23 bp, synthetic construct
  misc_feature 1..23: note = Synthetic Polynucleotide
  source 1..23: mol_type = other DNA
aagyagattttctgccaggtggg

SEQ ID NO: 3623 - DNA, 23 bp, synthetic construct
  misc_feature 1..23: note = Synthetic Polynucleotide
  source 1..23: mol_type = other DNA
gaagyagattttctgccaggtgg

SEQ ID NO: 3624 - DNA, 23 bp, synthetic construct
  misc_feature 1..23: note = Synthetic Polynucleotide
  source 1..23: mol_type = other DNA
gtagaagyagattttctgccagg

SEQ ID NO: 3625 - DNA, 23 bp, synthetic construct
  misc_feature 1..23: note = Synthetic Polynucleotide
  source 1..23: mol_type = other DNA
aaaaygtgttggtgcttgagggg

SEQ ID NO: 3626 - DNA, 23 bp, synthetic construct
  misc_feature 1..23: note = Synthetic Polynucleotide
  source 1..23: mol_type = other DNA
gaaaaygtgttggtgcttgaggg

SEQ ID NO: 3627 - DNA, 23 bp, synthetic construct
  misc_feature 1..23: note = Synthetic Polynucleotide
  source 1..23: mol_type = other DNA
agaaaaygtgttggtgcttgagg

SEQ ID NO: 3628 - DNA, 23 bp, synthetic construct
  misc_feature 1..23: note = Synthetic Polynucleotide
  source 1..23: mol_type = other DNA
gagcatyctctgtttcaaagagg

SEQ ID NO: 3629 - DNA, 23 bp, synthetic construct
  misc_feature 1..23: note = Synthetic Polynucleotide
  source 1..23: mol_type = other DNA
tgtagyaggtgaagatgatcagg

SEQ ID NO: 3630 - DNA, 23 bp, synthetic construct
  misc_feature 1..23: note = Synthetic Polynucleotide
  source 1..23: mol_type = other DNA
ggcagcaytgcactgacaggcgg

SEQ ID NO: 3631 - DNA, 23 bp, synthetic construct
  misc_feature 1..23: note = Synthetic Polynucleotide
  source 1..23: mol_type = other DNA
aaggactycccttgcaataaagg

SEQ ID NO: 3632 - DNA, 23 bp, synthetic construct
  misc_feature 1..23: note = Synthetic Polynucleotide
  source 1..23: mol_type = other DNA
gactycagatgtaactcttatgg

SEQ ID NO: 3633 - DNA, 23 bp, synthetic construct
  misc_feature 1..23: note = Synthetic Polynucleotide
  source 1..23: mol_type = other DNA
gactcyagctatatcttcacagg

SEQ ID NO: 3634 - DNA, 23 bp, synthetic construct
  misc_feature 1..23: note = Synthetic Polynucleotide
  source 1..23: mol_type = other DNA
ttccacayccacatcaccattgg

SEQ ID NO: 3635 - DNA, 23 bp, synthetic construct
  misc_feature 1..23: note = Synthetic Polynucleotide
  source 1..23: mol_type = other DNA
atcytctctgagttggtgttggg

SEQ ID NO: 3636 - DNA, 23 bp, synthetic construct
  misc_feature 1..23: note = Synthetic Polynucleotide
  source 1..23: mol_type = other DNA
gatcytctctgagttggtgttgg

SEQ ID NO: 3637 - DNA, 23 bp, synthetic construct
  misc_feature 1..23: note = Synthetic Polynucleotide
  source 1..23: mol_type = other DNA
aacctcgycttccaagtggctgg

SEQ ID NO: 3638 - DNA, 23 bp, synthetic construct
  misc_feature 1..23: note = Synthetic Polynucleotide
  source 1..23: mol_type = other DNA
ccccctycttttgggctcgctgg

SEQ ID NO: 3639 - DNA, 23 bp, synthetic construct
  misc_feature 1..23: note = Synthetic Polynucleotide
  source 1..23: mol_type = other DNA
tcaytgataagcagggcccaggg

SEQ ID NO: 3640 - DNA, 23 bp, synthetic construct
  misc_feature 1..23: note = Synthetic Polynucleotide
  source 1..23: mol_type = other DNA
ttcaytgataagcagggcccagg

SEQ ID NO: 3641 - DNA, 23 bp, synthetic construct
  misc_feature 1..23: note = Synthetic Polynucleotide
  source 1..23: mol_type = other DNA
gccgccgytttggctggcacggg

SEQ ID NO: 3642 - DNA, 23 bp, synthetic construct
  misc_feature 1..23: note = Synthetic Polynucleotide
  source 1..23: mol_type = other DNA
tgggcygttccaagacaccaggg

SEQ ID NO: 3643 - DNA, 23 bp, synthetic construct
  misc_feature 1..23: note = Synthetic Polynucleotide
  source 1..23: mol_type = other DNA
gtgggcygttccaagacaccagg

SEQ ID NO: 3644 - DNA, 23 bp, synthetic construct
  misc_feature 1..23: note = Synthetic Polynucleotide
  source 1..23: mol_type = other DNA
cactgcgyaggtggtgaccccgg

SEQ ID NO: 3645 - DNA, 23 bp, synthetic construct
  misc_feature 1..23: note = Synthetic Polynucleotide
  source 1..23: mol_type = other DNA
gtctyctactcggttcaggcggg

SEQ ID NO: 3646 - DNA, 23 bp, synthetic construct
  misc_feature 1..23: note = Synthetic Polynucleotide
  source 1..23: mol_type = other DNA
tgtctyctactcggttcaggcgg

SEQ ID NO: 3647 - DNA, 23 bp, synthetic construct
  misc_feature 1..23: note = Synthetic Polynucleotide
  source 1..23: mol_type = other DNA
aggyctgtggagtgcaggagagg

SEQ ID NO: 3648 - DNA, 23 bp, synthetic construct
  misc_feature 1..23: note = Synthetic Polynucleotide
  source 1..23: mol_type = other DNA
gccygcagtggagagaggagagg

SEQ ID NO: 3649 - DNA, 23 bp, synthetic construct
  misc_feature 1..23: note = Synthetic Polynucleotide
  source 1..23: mol_type = other DNA
ccgcccyggagacacgaagctgg

SEQ ID NO: 3650 - DNA, 23 bp, synthetic construct
  misc_feature 1..23: note = Synthetic Polynucleotide
  source 1..23: mol_type = other DNA
accygtcgagataatgggtcagg

SEQ ID NO: 3651 - DNA, 23 bp, synthetic construct
  misc_feature 1..23: note = Synthetic Polynucleotide
  source 1..23: mol_type = other DNA
cctctgycatgaagatgtcctgg

SEQ ID NO: 3652 - DNA, 23 bp, synthetic construct
  misc_feature 1..23: note = Synthetic Polynucleotide
  source 1..23: mol_type = other DNA
ctcctgyccccgctccacggtgg

SEQ ID NO: 3653 - DNA, 23 bp, synthetic construct
  misc_feature 1..23: note = Synthetic Polynucleotide
  source 1..23: mol_type = other DNA
acatgyagcaggcgcagtagggg

SEQ ID NO: 3654 - DNA, 23 bp, synthetic construct
  misc_feature 1..23: note = Synthetic Polynucleotide
  source 1..23: mol_type = other DNA
gacatgyagcaggcgcagtaggg

SEQ ID NO: 3655 - DNA, 23 bp, synthetic construct
  misc_feature 1..23: note = Synthetic Polynucleotide
  source 1..23: mol_type = other DNA
agacatgyagcaggcgcagtagg

SEQ ID NO: 3656 - DNA, 23 bp, synthetic construct
  misc_feature 1..23: note = Synthetic Polynucleotide
  source 1..23: mol_type = other DNA
ctcaygatctgggatctcagagg

SEQ ID NO: 3657 - DNA, 23 bp, synthetic construct
  misc_feature 1..23: note = Synthetic Polynucleotide
  source 1..23: mol_type = other DNA
gcaygacactgcaggggggtggg

SEQ ID NO: 3658 - DNA, 23 bp, synthetic construct
  misc_feature 1..23: note = Synthetic Polynucleotide
  source 1..23: mol_type = other DNA
cgcaygacactgcaggggggtgg

SEQ ID NO: 3659 - DNA, 23 bp, synthetic construct
  misc_feature 1..23: note = Synthetic Polynucleotide
  source 1..23: mol_type = other DNA
aaccgcaygacactgcagggggg

SEQ ID NO: 3660 - DNA, 23 bp, synthetic construct
  misc_feature 1..23: note = Synthetic Polynucleotide
  source 1..23: mol_type = other DNA
gacycccgtgaaatgattcccgg

SEQ ID NO: 3661 - DNA, 23 bp, synthetic construct
  misc_feature 1..23: note = Synthetic Polynucleotide
  source 1..23: mol_type = other DNA
tcaaccycaccctgtacttcagg

SEQ ID NO: 3662 - DNA, 23 bp, synthetic construct
  misc_feature 1..23: note = Synthetic Polynucleotide
  source 1..23: mol_type = other DNA
gggcyttattccatctctctcgg

SEQ ID NO: 3663 - DNA, 23 bp, synthetic construct
  misc_feature 1..23: note = Synthetic Polynucleotide
  source 1..23: mol_type = other DNA
caggyccagatcgaaatcccggg

SEQ ID NO: 3664 - DNA, 23 bp, synthetic construct
  misc_feature 1..23: note = Synthetic Polynucleotide
  source 1..23: mol_type = other DNA
ccaggyccagatcgaaatcccgg

SEQ ID NO: 3665 - DNA, 23 bp, synthetic construct
  misc_feature 1..23: note = Synthetic Polynucleotide
  source 1..23: mol_type = other DNA
agctgtgygatgaagcaggcagg

SEQ ID NO: 3666 - DNA, 23 bp, synthetic construct
  misc_feature 1..23: note = Synthetic Polynucleotide
  source 1..23: mol_type = other DNA
tacttgcygtagaacagaagggg

SEQ ID NO: 3667 - DNA, 23 bp, synthetic construct
  misc_feature 1..23: note = Synthetic Polynucleotide
  source 1..23: mol_type = other DNA
gtcccygtgtcccgcagtctagg

SEQ ID NO: 3668 - DNA, 23 bp, synthetic construct
  misc_feature 1..23: note = Synthetic Polynucleotide
  source 1..23: mol_type = other DNA
tatcaaygaactgtccctcaggg

SEQ ID NO: 3669 - DNA, 23 bp, synthetic construct
  misc_feature 1..23: note = Synthetic Polynucleotide
  source 1..23: mol_type = other DNA
ctatcaaygaactgtccctcagg

SEQ ID NO: 3670 - DNA, 23 bp, synthetic construct
  misc_feature 1..23: note = Synthetic Polynucleotide
  source 1..23: mol_type = other DNA
gtgtgtayagatgtccagaaggg

SEQ ID NO: 3671 - DNA, 23 bp, synthetic construct
  misc_feature 1..23: note = Synthetic Polynucleotide
  source 1..23: mol_type = other DNA
atgacgyggcctgaatcacaggg

SEQ ID NO: 3672 - DNA, 23 bp, synthetic construct
  misc_feature 1..23: note = Synthetic Polynucleotide
  source 1..23: mol_type = other DNA
aatgacgyggcctgaatcacagg

SEQ ID NO: 3673 - DNA, 23 bp, synthetic construct
  misc_feature 1..23: note = Synthetic Polynucleotide
  source 1..23: mol_type = other DNA
atatccygggggagcagaaaggg

SEQ ID NO: 3674 - DNA, 23 bp, synthetic construct
  misc_feature 1..23: note = Synthetic Polynucleotide
  source 1..23: mol_type = other DNA
gatatccygggggagcagaaagg

SEQ ID NO: 3675 - DNA, 23 bp, synthetic construct
  misc_feature 1..23: note = Synthetic Polynucleotide
  source 1..23: mol_type = other DNA
tgctgaytggaaaccgtgagtgg

SEQ ID NO: 3676 - DNA, 23 bp, synthetic construct
  misc_feature 1..23: note = Synthetic Polynucleotide
  source 1..23: mol_type = other DNA
cagcccaytgataattgggatgg

SEQ ID NO: 3677 - DNA, 23 bp, synthetic construct
  misc_feature 1..23: note = Synthetic Polynucleotide
  source 1..23: mol_type = other DNA
tccyaaaaggcacgggatgaagg

SEQ ID NO: 3678 - DNA, 23 bp, synthetic construct
  misc_feature 1..23: note = Synthetic Polynucleotide
  source 1..23: mol_type = other DNA
atagtgtycctaaaaggcacggg

SEQ ID NO: 3679 - DNA, 23 bp, synthetic construct
  misc_feature 1..23: note = Synthetic Polynucleotide
  source 1..23: mol_type = other DNA
agaygagggtctcagccctgcgg

SEQ ID NO: 3680 - DNA, 23 bp, synthetic construct
  misc_feature 1..23: note = Synthetic Polynucleotide
  source 1..23: mol_type = other DNA
atcyatcaaatacaaaaatttgg

SEQ ID NO: 3681 - DNA, 23 bp, synthetic construct
  misc_feature 1..23: note = Synthetic Polynucleotide
  source 1..23: mol_type = other DNA
cttayagatctcatcaatgttgg

SEQ ID NO: 3682 - DNA, 23 bp, synthetic construct
  misc_feature 1..23: note = Synthetic Polynucleotide
  source 1..23: mol_type = other DNA
cagctcygagaagaaaccacggg

SEQ ID NO: 3683 - DNA, 23 bp, synthetic construct
  misc_feature 1..23: note = Synthetic Polynucleotide
  source 1..23: mol_type = other DNA
tcagctcygagaagaaaccacgg

SEQ ID NO: 3684 - DNA, 23 bp, synthetic construct
  misc_feature 1..23: note = Synthetic Polynucleotide
  source 1..23: mol_type = other DNA
cttcytgctgcggtccccaatgg

SEQ ID NO: 3685 - DNA, 23 bp, synthetic construct
  misc_feature 1..23: note = Synthetic Polynucleotide
  source 1..23: mol_type = other DNA
ttcccygtaagaaaattaacagg

SEQ ID NO: 3686 - DNA, 23 bp, synthetic construct
  misc_feature 1..23: note = Synthetic Polynucleotide
  source 1..23: mol_type = other DNA
gcaccayggctgcgggtcgaggg

SEQ ID NO: 3687 - DNA, 23 bp, synthetic construct
  misc_feature 1..23: note = Synthetic Polynucleotide
  source 1..23: mol_type = other DNA
ggcaccayggctgcgggtcgagg

SEQ ID NO: 3688 - DNA, 23 bp, synthetic construct
  misc_feature 1..23: note = Synthetic Polynucleotide
  source 1..23: mol_type = other DNA
tggcytgtcacccggatatgtgg

SEQ ID NO: 3689 - DNA, 23 bp, synthetic construct
  misc_feature 1..23: note = Synthetic Polynucleotide
  source 1..23: mol_type = other DNA
atcyaaagcaaaagacaagcagg

SEQ ID NO: 3690 - DNA, 23 bp, synthetic construct
  misc_feature 1..23: note = Synthetic Polynucleotide
  source 1..23: mol_type = other DNA
tccyagtaagaaacagaatatgg

SEQ ID NO: 3691 - DNA, 23 bp, synthetic construct
  misc_feature 1..23: note = Synthetic Polynucleotide
  source 1..23: mol_type = other DNA
gaccygcaggcaggagaaggggg

SEQ ID NO: 3692 - DNA, 23 bp, synthetic construct
  misc_feature 1..23: note = Synthetic Polynucleotide
  source 1..23: mol_type = other DNA
tgaccygcaggcaggagaagggg

SEQ ID NO: 3693 - DNA, 23 bp, synthetic construct
  misc_feature 1..23: note = Synthetic Polynucleotide
  source 1..23: mol_type = other DNA
ctgaccygcaggcaggagaaggg

SEQ ID NO: 3694 - DNA, 23 bp, synthetic construct
  misc_feature 1..23: note = Synthetic Polynucleotide
  source 1..23: mol_type = other DNA
gctgaccygcaggcaggagaagg

SEQ ID NO: 3695 - DNA, 23 bp, synthetic construct
  misc_feature 1..23: note = Synthetic Polynucleotide
  source 1..23: mol_type = other DNA
caaygaagaggaattgcccctgg

SEQ ID NO: 3696 - DNA, 23 bp, synthetic construct
  misc_feature 1..23: note = Synthetic Polynucleotide
  source 1..23: mol_type = other DNA
ggaacaygcactcctcttccagg

SEQ ID NO: 3697 - DNA, 23 bp, synthetic construct
  misc_feature 1..23: note = Synthetic Polynucleotide
  source 1..23: mol_type = other DNA
gtagyaggcccaagcccgacagg

SEQ ID NO: 3698 - DNA, 23 bp, synthetic construct
  misc_feature 1..23: note = Synthetic Polynucleotide
  source 1..23: mol_type = other DNA
gtaagtgytgaccaaattaccgg

SEQ ID NO: 3699 - DNA, 23 bp, synthetic construct
  misc_feature 1..23: note = Synthetic Polynucleotide
  source 1..23: mol_type = other DNA
tccygtcatcactctttttgtgg

SEQ ID NO: 3700 - DNA, 23 bp, synthetic construct
  misc_feature 1..23: note = Synthetic Polynucleotide
  source 1..23: mol_type = other DNA
ggtgttgytggaatggagaatgg

SEQ ID NO: 3701 - DNA, 23 bp, synthetic construct
  misc_feature 1..23: note = Synthetic Polynucleotide
  source 1..23: mol_type = other DNA
cactgytgacgaaggtagcaggg

SEQ ID NO: 3702 - DNA, 23 bp, synthetic construct
  misc_feature 1..23: note = Synthetic Polynucleotide
  source 1..23: mol_type = other DNA
gcactgytgacgaaggtagcagg

SEQ ID NO: 3703 - DNA, 23 bp, synthetic construct
  misc_feature 1..23: note = Synthetic Polynucleotide
  source 1..23: mol_type = other DNA
ctcayggttggttggcaagaagg

SEQ ID NO: 3704 - DNA, 23 bp, synthetic construct
  misc_feature 1..23: note = Synthetic Polynucleotide
  source 1..23: mol_type = other DNA
gcggtcaytgaggttctgcatgg

SEQ ID NO: 3705 - DNA, 23 bp, synthetic construct
  misc_feature 1..23: note = Synthetic Polynucleotide
  source 1..23: mol_type = other DNA
gctggaycgaggccttaaaaggg

SEQ ID NO: 3706 - DNA, 23 bp, synthetic construct
  misc_feature 1..23: note = Synthetic Polynucleotide
  source 1..23: mol_type = other DNA
agctggaycgaggccttaaaagg

SEQ ID NO: 3707 - DNA, 23 bp, synthetic construct
  misc_feature 1..23: note = Synthetic Polynucleotide
  source 1..23: mol_type = other DNA
actytttgggatcgacttcctgg

SEQ ID NO: 3708 - DNA, 23 bp, synthetic construct
  misc_feature 1..23: note = Synthetic Polynucleotide
  source 1..23: mol_type = other DNA
aatcytggccccatagcagatgg

SEQ ID NO: 3709 - DNA, 23 bp, synthetic construct
  misc_feature 1..23: note = Synthetic Polynucleotide
  source 1..23: mol_type = other DNA
tccactycttctggctttctggg

SEQ ID NO: 3710 - DNA, 23 bp, synthetic construct
  misc_feature 1..23: note = Synthetic Polynucleotide
  source 1..23: mol_type = other DNA
atccactycttctggctttctgg

SEQ ID NO: 3711 - DNA, 23 bp, synthetic construct
  misc_feature 1..23: note = Synthetic Polynucleotide
  source 1..23: mol_type = other DNA
actttcygttttctgcctctggg

SEQ ID NO: 3712 - DNA, 23 bp, synthetic construct
  misc_feature 1..23: note = Synthetic Polynucleotide
  source 1..23: mol_type = other DNA
cactttcygttttctgcctctgg

SEQ ID NO: 3713 - DNA, 23 bp, synthetic construct
  misc_feature 1..23: note = Synthetic Polynucleotide
  source 1..23: mol_type = other DNA
aaatatgyggtcacactttgtgg

SEQ ID NO: 3714 - DNA, 23 bp, synthetic construct
  misc_feature 1..23: note = Synthetic Polynucleotide
  source 1..23: mol_type = other DNA
acgytgagctggggctgcgcggg

SEQ ID NO: 3715 - DNA, 23 bp, synthetic construct
  misc_feature 1..23: note = Synthetic Polynucleotide
  source 1..23: mol_type = other DNA
cacgytgagctggggctgcgcgg

SEQ ID NO: 3716 - DNA, 23 bp, synthetic construct
  misc_feature 1..23: note = Synthetic Polynucleotide
  source 1..23: mol_type = other DNA
ggtggyactggaaggggaagtgg

SEQ ID NO: 3717 - DNA, 23 bp, synthetic construct
  misc_feature 1..23: note = Synthetic Polynucleotide
  source 1..23: mol_type = other DNA
ttgycctctgtccaggcatctgg

SEQ ID NO: 3718 - DNA, 23 bp, synthetic construct
  misc_feature 1..23: note = Synthetic Polynucleotide
  source 1..23: mol_type = other DNA
cgcyctcgtaccctgtgctgtgg

SEQ ID NO: 3719 - DNA, 23 bp, synthetic construct
  misc_feature 1..23: note = Synthetic Polynucleotide
  source 1..23: mol_type = other DNA
gtggygcccgaggtgcccattgg

SEQ ID NO: 3720 - DNA, 23 bp, synthetic construct
  misc_feature 1..23: note = Synthetic Polynucleotide
  source 1..23: mol_type = other DNA
ttayacaaaacaatgttgagtgg

SEQ ID NO: 3721 - DNA, 23 bp, synthetic construct
  misc_feature 1..23: note = Synthetic Polynucleotide
  source 1..23: mol_type = other DNA
gccaayggtaacgggcctttggg

SEQ ID NO: 3722 - DNA, 23 bp, synthetic construct
  misc_feature 1..23: note = Synthetic Polynucleotide
  source 1..23: mol_type = other DNA
agccaayggtaacgggcctttgg

SEQ ID NO: 3723 - DNA, 23 bp, synthetic construct
  misc_feature 1..23: note = Synthetic Polynucleotide
  source 1..23: mol_type = other DNA
acaatyccagctggctgggctgg

SEQ ID NO: 3724 - DNA, 23 bp, synthetic construct
  misc_feature 1..23: note = Synthetic Polynucleotide
  source 1..23: mol_type = other DNA
cggytctggaaccagacctgggg

SEQ ID NO: 3725 - DNA, 23 bp, synthetic construct
  misc_feature 1..23: note = Synthetic Polynucleotide
  source 1..23: mol_type = other DNA
gcggytctggaaccagacctggg

SEQ ID NO: 3726 - DNA, 23 bp, synthetic construct
  misc_feature 1..23: note = Synthetic Polynucleotide
  source 1..23: mol_type = other DNA
tgcggytctggaaccagacctgg

SEQ ID NO: 3727 - DNA, 23 bp, synthetic construct
  misc_feature 1..23: note = Synthetic Polynucleotide
  source 1..23: mol_type = other DNA
cccayggctgcggctggcggcgg

SEQ ID NO: 3728 - DNA, 23 bp, synthetic construct
  misc_feature 1..23: note = Synthetic Polynucleotide
  source 1..23: mol_type = other DNA
cggcccayggctgcggctggcgg

SEQ ID NO: 3729 - DNA, 23 bp, synthetic construct
  misc_feature 1..23: note = Synthetic Polynucleotide
  source 1..23: mol_type = other DNA
aagtcayagtgcacggcacaagg

SEQ ID NO: 3730 - DNA, 23 bp, synthetic construct
  misc_feature 1..23: note = Synthetic Polynucleotide
  source 1..23: mol_type = other DNA
aagcygctctgagggctcccagg

SEQ ID NO: 3731 - DNA, 23 bp, synthetic construct
  misc_feature 1..23: note = Synthetic Polynucleotide
  source 1..23: mol_type = other DNA
tccayagatgaagttattgcagg

SEQ ID NO: 3732 - DNA, 23 bp, synthetic construct
  misc_feature 1..23: note = Synthetic Polynucleotide
  source 1..23: mol_type = other DNA
cagyggtacagggtgaccacggg

SEQ ID NO: 3733 - DNA, 23 bp, synthetic construct
  misc_feature 1..23: note = Synthetic Polynucleotide
  source 1..23: mol_type = other DNA
ccagyggtacagggtgaccacgg

SEQ ID NO: 3734 - DNA, 23 bp, synthetic construct
  misc_feature 1..23: note = Synthetic Polynucleotide
  source 1..23: mol_type = other DNA
tggyagaggcccctggggtcagg

SEQ ID NO: 3735 - DNA, 23 bp, synthetic construct
  misc_feature 1..23: note = Synthetic Polynucleotide
  source 1..23: mol_type = other DNA
tgayggaggggatggcgcctagg

SEQ ID NO: 3736 - DNA, 23 bp, synthetic construct
  misc_feature 1..23: note = Synthetic Polynucleotide
  source 1..23: mol_type = other DNA
gtgygatcatgtaatggcgccgg

SEQ ID NO: 3737 - DNA, 23 bp, synthetic construct
  misc_feature 1..23: note = Synthetic Polynucleotide
  source 1..23: mol_type = other DNA
cctgaccytgtcggagctccggg

SEQ ID NO: 3738 - DNA, 23 bp, synthetic construct
  misc_feature 1..23: note = Synthetic Polynucleotide
  source 1..23: mol_type = other DNA
ccayagaagcccacgatgtacgg

SEQ ID NO: 3739 - DNA, 23 bp, synthetic construct
  misc_feature 1..23: note = Synthetic Polynucleotide
  source 1..23: mol_type = other DNA
gccacacyctctgccttgcccgg

SEQ ID NO: 3740 - DNA, 23 bp, synthetic construct
  misc_feature 1..23: note = Synthetic Polynucleotide
  source 1..23: mol_type = other DNA
gggtcygcatttgtccgtggagg

SEQ ID NO: 3741 - DNA, 23 bp, synthetic construct
  misc_feature 1..23: note = Synthetic Polynucleotide
  source 1..23: mol_type = other DNA
cgctctyggcaaagaacgctggg

SEQ ID NO: 3742 - DNA, 23 bp, synthetic construct
  misc_feature 1..23: note = Synthetic Polynucleotide
  source 1..23: mol_type = other DNA
gcgctctyggcaaagaacgctgg

SEQ ID NO: 3743 - DNA, 23 bp, synthetic construct
  misc_feature 1..23: note = Synthetic Polynucleotide
  source 1..23: mol_type = other DNA
agcttytttgtagacaggcatgg

SEQ ID NO: 3744 - DNA, 23 bp, synthetic construct
  misc_feature 1..23: note = Synthetic Polynucleotide
  source 1..23: mol_type = other DNA
agactttyctgcttaaagaaggg

SEQ ID NO: 3745 - DNA, 23 bp, synthetic construct
  misc_feature 1..23: note = Synthetic Polynucleotide
  source 1..23: mol_type = other DNA
ccttttcytgtgtatttgattgg

SEQ ID NO: 3746 - DNA, 23 bp, synthetic construct
  misc_feature 1..23: note = Synthetic Polynucleotide
  source 1..23: mol_type = other DNA
gacacgyctgtgtagtgcacagg

SEQ ID NO: 3747 - DNA, 23 bp, synthetic construct
  misc_feature 1..23: note = Synthetic Polynucleotide
  source 1..23: mol_type = other DNA
cacataayacgaactggtgctgg

SEQ ID NO: 3748 - DNA, 23 bp, synthetic construct
  misc_feature 1..23: note = Synthetic Polynucleotide
  source 1..23: mol_type = other DNA
actycttctctttctcctgaggg

SEQ ID NO: 3749 - DNA, 23 bp, synthetic construct
  misc_feature 1..23: note = Synthetic Polynucleotide
  source 1..23: mol_type = other DNA
tactycttctctttctcctgagg

SEQ ID NO: 3750 - DNA, 23 bp, synthetic construct
  misc_feature 1..23: note = Synthetic Polynucleotide
  source 1..23: mol_type = other DNA
gcccayagtgtccagagacctgg

SEQ ID NO: 3751 - DNA, 23 bp, synthetic construct
  misc_feature 1..23: note = Synthetic Polynucleotide
  source 1..23: mol_type = other DNA
accgtygtggcccagcaggacgg

SEQ ID NO: 3752 - DNA, 23 bp, synthetic construct
  misc_feature 1..23: note = Synthetic Polynucleotide
  source 1..23: mol_type = other DNA
cgcygaagatgaggcagaccagg

SEQ ID NO: 3753 - DNA, 23 bp, synthetic construct
  misc_feature 1..23: note = Synthetic Polynucleotide
  source 1..23: mol_type = other DNA
ataycaccacacacaggtaacgg

SEQ ID NO: 3754 - DNA, 23 bp, synthetic construct
  misc_feature 1..23: note = Synthetic Polynucleotide
  source 1..23: mol_type = other DNA
tggytgcacagacagtacgtggg

SEQ ID NO: 3755 - DNA, 23 bp, synthetic construct
  misc_feature 1..23: note = Synthetic Polynucleotide
  source 1..23: mol_type = other DNA
ctggytgcacagacagtacgtgg

SEQ ID NO: 3756 - DNA, 23 bp, synthetic construct
  misc_feature 1..23: note = Synthetic Polynucleotide
  source 1..23: mol_type = other DNA
gatcaycttcatgtagggcaggg

SEQ ID NO: 3757 - DNA, 23 bp, synthetic construct
  misc_feature 1..23: note = Synthetic Polynucleotide
  source 1..23: mol_type = other DNA
agatcaycttcatgtagggcagg

SEQ ID NO: 3758 - DNA, 23 bp, synthetic construct
  misc_feature 1..23: note = Synthetic Polynucleotide
  source 1..23: mol_type = other DNA
cggytggccttgggattgagggg

SEQ ID NO: 3759 - DNA, 23 bp, synthetic construct
  misc_feature 1..23: note = Synthetic Polynucleotide
  source 1..23: mol_type = other DNA
gcggytggccttgggattgaggg

SEQ ID NO: 3760 - DNA, 23 bp, synthetic construct
  misc_feature 1..23: note = Synthetic Polynucleotide
  source 1..23: mol_type = other DNA
cgcggytggccttgggattgagg

SEQ ID NO: 3761 - DNA, 23 bp, synthetic construct
  misc_feature 1..23: note = Synthetic Polynucleotide
  source 1..23: mol_type = other DNA
ccayccaaccctaagagaagagg

SEQ ID NO: 3762 - DNA, 23 bp, synthetic construct
  misc_feature 1..23: note = Synthetic Polynucleotide
  source 1..23: mol_type = other DNA
ctgyggatgcactggggtgcggg

SEQ ID NO: 3763 - DNA, 23 bp, synthetic construct
  misc_feature 1..23: note = Synthetic Polynucleotide
  source 1..23: mol_type = other DNA
tctgyggatgcactggggtgcgg

SEQ ID NO: 3764 - DNA, 23 bp, synthetic construct
  misc_feature 1..23: note = Synthetic Polynucleotide
  source 1..23: mol_type = other DNA
tgaccgygatctgcagagaaggg

SEQ ID NO: 3765 - DNA, 23 bp, synthetic construct
  misc_feature 1..23: note = Synthetic Polynucleotide
  source 1..23: mol_type = other DNA
ctgaccgygatctgcagagaagg

SEQ ID NO: 3766 - DNA, 23 bp, synthetic construct
  misc_feature 1..23: note = Synthetic Polynucleotide
  source 1..23: mol_type = other DNA
gctcaygaagaagatgttctggg

SEQ ID NO: 3767 - DNA, 23 bp, synthetic construct
  misc_feature 1..23: note = Synthetic Polynucleotide
  source 1..23: mol_type = other DNA
tgctcaygaagaagatgttctgg

SEQ ID NO: 3768 - DNA, 23 bp, synthetic construct
  misc_feature 1..23: note = Synthetic Polynucleotide
  source 1..23: mol_type = other DNA
caacyccactttagagcgaaagg

SEQ ID NO: 3769 - DNA, 23 bp, synthetic construct
  misc_feature 1..23: note = Synthetic Polynucleotide
  source 1..23: mol_type = other DNA
gtcayagttctggcacgttttgg

SEQ ID NO: 3770 - DNA, 23 bp, synthetic construct
  misc_feature 1..23: note = Synthetic Polynucleotide
  source 1..23: mol_type = other DNA
cccactyggctcaagaccaatgg

SEQ ID NO: 3771 - DNA, 23 bp, synthetic construct
  misc_feature 1..23: note = Synthetic Polynucleotide
  source 1..23: mol_type = other DNA
ctgcyctccacgtcgccccgggg

SEQ ID NO: 3772 - DNA, 23 bp, synthetic construct
  misc_feature 1..23: note = Synthetic Polynucleotide
  source 1..23: mol_type = other DNA
cctgcyctccacgtcgccccggg

SEQ ID NO: 3773 - DNA, 23 bp, synthetic construct
  misc_feature 1..23: note = Synthetic Polynucleotide
  source 1..23: mol_type = other DNA
gcctgcyctccacgtcgccccgg

SEQ ID NO: 3774 - DNA, 23 bp, synthetic construct
  misc_feature 1..23: note = Synthetic Polynucleotide
  source 1..23: mol_type = other DNA
atayagttttcagggcccggagg

SEQ ID NO: 3775 - DNA, 23 bp, synthetic construct
  misc_feature 1..23: note = Synthetic Polynucleotide
  source 1..23: mol_type = other DNA
ctgatayagttttcagggcccgg

SEQ ID NO: 3776 - DNA, 23 bp, synthetic construct
  misc_feature 1..23: note = Synthetic Polynucleotide
  source 1..23: mol_type = other DNA
cgaygttgaagagggcaggcagg

SEQ ID NO: 3777 - DNA, 23 bp, synthetic construct
  misc_feature 1..23: note = Synthetic Polynucleotide
  source 1..23: mol_type = other DNA
agcccgaygttgaagagggcagg

SEQ ID NO: 3778 - DNA, 23 bp, synthetic construct
  misc_feature 1..23: note = Synthetic Polynucleotide
  source 1..23: mol_type = other DNA
tgaggyaatcagccaggatctgg

SEQ ID NO: 3779 - DNA, 23 bp, synthetic construct
  misc_feature 1..23: note = Synthetic Polynucleotide
  source 1..23: mol_type = other DNA
ggaccygcacccggggaaggcgg

SEQ ID NO: 3780 - DNA, 23 bp, synthetic construct
  misc_feature 1..23: note = Synthetic Polynucleotide
  source 1..23: mol_type = other DNA
agagctayagtgttcctaaaagg

SEQ ID NO: 3781 - DNA, 23 bp, synthetic construct
  misc_feature 1..23: note = Synthetic Polynucleotide
  source 1..23: mol_type = other DNA
tgaatycctaaggaagagactgg

SEQ ID NO: 3782 - DNA, 23 bp, synthetic construct
  misc_feature 1..23: note = Synthetic Polynucleotide
  source 1..23: mol_type = other DNA
agcygcaggggcacagggatggg

SEQ ID NO: 3783 - DNA, 23 bp, synthetic construct
  misc_feature 1..23: note = Synthetic Polynucleotide
  source 1..23: mol_type = other DNA
aagcygcaggggcacagggatgg

SEQ ID NO: 3784 - DNA, 23 bp, synthetic construct
  misc_feature 1..23: note = Synthetic Polynucleotide
  source 1..23: mol_type = other DNA
agaatctycaatagacacatcgg

SEQ ID NO: 3785 - DNA, 23 bp, synthetic construct
  misc_feature 1..23: note = Synthetic Polynucleotide
  source 1..23: mol_type = other DNA
atcytgtcatcatcatcaaaggg

SEQ ID NO: 3786 - DNA, 23 bp, synthetic construct
  misc_feature 1..23: note = Synthetic Polynucleotide
  source 1..23: mol_type = other DNA
gatcytgtcatcatcatcaaagg

SEQ ID NO: 3787 - DNA, 23 bp, synthetic construct
  misc_feature 1..23: note = Synthetic Polynucleotide
  source 1..23: mol_type = other DNA
tcatcygtttgcctgctaagcgg

SEQ ID NO: 3788 - DNA, 23 bp, synthetic construct
  misc_feature 1..23: note = Synthetic Polynucleotide
  source 1..23: mol_type = other DNA
ccgacyccaccttgggcagctgg

SEQ ID NO: 3789 - DNA, 23 bp, synthetic construct
  misc_feature 1..23: note = Synthetic Polynucleotide
  source 1..23: mol_type = other DNA
attcayatctgcctccatgttgg

SEQ ID NO: 3790 - DNA, 23 bp, synthetic construct
  misc_feature 1..23: note = Synthetic Polynucleotide
  source 1..23: mol_type = other DNA
attcaccyaccgacaaggatagg

SEQ ID NO: 3791 - DNA, 23 bp, synthetic construct
  misc_feature 1..23: note = Synthetic Polynucleotide
  source 1..23: mol_type = other DNA
gaagtcgytgtcaaacaggaagg

SEQ ID NO: 3792 - DNA, 23 bp, synthetic construct
  misc_feature 1..23: note = Synthetic Polynucleotide
  source 1..23: mol_type = other DNA
tgacctyactgggtggtgacggg

SEQ ID NO: 3793 - DNA, 23 bp, synthetic construct
  misc_feature 1..23: note = Synthetic Polynucleotide
  source 1..23: mol_type = other DNA
atgacctyactgggtggtgacgg

SEQ ID NO: 3794 - DNA, 23 bp, synthetic construct
  misc_feature 1..23: note = Synthetic Polynucleotide
  source 1..23: mol_type = other DNA
cagcygccaatggttccagttgg

SEQ ID NO: 3795 - DNA, 23 bp, synthetic construct
  misc_feature 1..23: note = Synthetic Polynucleotide
  source 1..23: mol_type = other DNA
cctccyccccagactgaagccgg

SEQ ID NO: 3796 - DNA, 23 bp, synthetic construct
  misc_feature 1..23: note = Synthetic Polynucleotide
  source 1..23: mol_type = other DNA
caccytggggacaccaggtcggg

SEQ ID NO: 3797 - DNA, 23 bp, synthetic construct
  misc_feature 1..23: note = Synthetic Polynucleotide
  source 1..23: mol_type = other DNA
tcaccytggggacaccaggtcgg

SEQ ID NO: 3798 - DNA, 23 bp, synthetic construct
  misc_feature 1..23: note = Synthetic Polynucleotide
  source 1..23: mol_type = other DNA
ccaactyacgagccacctacagg

SEQ ID NO: 3799 - DNA, 23 bp, synthetic construct
  misc_feature 1..23: note = Synthetic Polynucleotide
  source 1..23: mol_type = other DNA
atcyctcagcaaactcagcacgg

SEQ ID NO: 3800 - DNA, 23 bp, synthetic construct
  misc_feature 1..23: note = Synthetic Polynucleotide
  source 1..23: mol_type = other DNA
gcagtggyaggtgatgttctggg

SEQ ID NO: 3801 - DNA, 23 bp, synthetic construct
  misc_feature 1..23: note = Synthetic Polynucleotide
  source 1..23: mol_type = other DNA
cctcyctcaccacgttgcccagg

SEQ ID NO: 3802 - DNA, 23 bp, synthetic construct
  misc_feature 1..23: note = Synthetic Polynucleotide
  source 1..23: mol_type = other DNA
ataggcayagatattgtcccagg

SEQ ID NO: 3803 - DNA, 23 bp, synthetic construct
  misc_feature 1..23: note = Synthetic Polynucleotide
  source 1..23: mol_type = other DNA
gctgyggcaacagaggccttcgg

SEQ ID NO: 3804 - DNA, 23 bp, synthetic construct
  misc_feature 1..23: note = Synthetic Polynucleotide
  source 1..23: mol_type = other DNA
cttyattcaaagaccaggaaggg

SEQ ID NO: 3805 - DNA, 23 bp, synthetic construct
  misc_feature 1..23: note = Synthetic Polynucleotide
  source 1..23: mol_type = other DNA
acttyattcaaagaccaggaagg

SEQ ID NO: 3806 - DNA, 23 bp, synthetic construct
  misc_feature 1..23: note = Synthetic Polynucleotide
  source 1..23: mol_type = other DNA
acttaycctggggagaaggatgg

SEQ ID NO: 3807 - DNA, 23 bp, synthetic construct
  misc_feature 1..23: note = Synthetic Polynucleotide
  source 1..23: mol_type = other DNA
cgtggytggggaagggcagctgg

SEQ ID NO: 3808 - DNA, 23 bp, synthetic construct
  misc_feature 1..23: note = Synthetic Polynucleotide
  source 1..23: mol_type = other DNA
gacttygagttcagacatgaggg

SEQ ID NO: 3809 - DNA, 23 bp, synthetic construct
  misc_feature 1..23: note = Synthetic Polynucleotide
  source 1..23: mol_type = other DNA
ggacttygagttcagacatgagg

SEQ ID NO: 3810 - DNA, 23 bp, synthetic construct
  misc_feature 1..23: note = Synthetic Polynucleotide
  source 1..23: mol_type = other DNA
ggcatagyggaagatctatgagg

SEQ ID NO: 3811 - DNA, 23 bp, synthetic construct
  misc_feature 1..23: note = Synthetic Polynucleotide
  source 1..23: mol_type = other DNA
agaaycattcttgatgtctctgg

SEQ ID NO: 3812 - DNA, 23 bp, synthetic construct
  misc_feature 1..23: note = Synthetic Polynucleotide
  source 1..23: mol_type = other DNA
gttcytaccacttaaagacgagg

SEQ ID NO: 3813 - DNA, 23 bp, synthetic construct
  misc_feature 1..23: note = Synthetic Polynucleotide
  source 1..23: mol_type = other DNA
accygagatgcaaaatagggagg

SEQ ID NO: 3814 - DNA, 23 bp, synthetic construct
  misc_feature 1..23: note = Synthetic Polynucleotide
  source 1..23: mol_type = other DNA
gtgaccygagatgcaaaataggg

SEQ ID NO: 3815 - DNA, 23 bp, synthetic construct
  misc_feature 1..23: note = Synthetic Polynucleotide
  source 1..23: mol_type = other DNA
ggtgaccygagatgcaaaatagg

SEQ ID NO: 3816 - DNA, 23 bp, synthetic construct
  misc_feature 1..23: note = Synthetic Polynucleotide
  source 1..23: mol_type = other DNA
ttcttcgyggactgcaaacaagg

SEQ ID NO: 3817 - DNA, 23 bp, synthetic construct
  misc_feature 1..23: note = Synthetic Polynucleotide
  source 1..23: mol_type = other DNA
agcaacygcagaaaaaagagggg

SEQ ID NO: 3818 - DNA, 23 bp, synthetic construct
  misc_feature 1..23: note = Synthetic Polynucleotide
  source 1..23: mol_type = other DNA
cagcaacygcagaaaaaagaggg

SEQ ID NO: 3819 - DNA, 23 bp, synthetic construct
  misc_feature 1..23: note = Synthetic Polynucleotide
  source 1..23: mol_type = other DNA
ggctgytgttggccagcagaagg

SEQ ID NO: 3820 - DNA, 23 bp, synthetic construct
  misc_feature 1..23: note = Synthetic Polynucleotide
  source 1..23: mol_type = other DNA
ccaccygaggcaggggcggcagg

SEQ ID NO: 3821 - DNA, 23 bp, synthetic construct
  misc_feature 1..23: note = Synthetic Polynucleotide
  source 1..23: mol_type = other DNA
cgttacygaaactcctgtgtagg

SEQ ID NO: 3822 - DNA, 23 bp, synthetic construct
  misc_feature 1..23: note = Synthetic Polynucleotide
  source 1..23: mol_type = other DNA
cgttcccygaggcaaaagagggg

SEQ ID NO: 3823 - DNA, 23 bp, synthetic construct
  misc_feature 1..23: note = Synthetic Polynucleotide
  source 1..23: mol_type = other DNA
acttycccctaggcggaaagggg

SEQ ID NO: 3824 - DNA, 23 bp, synthetic construct
  misc_feature 1..23: note = Synthetic Polynucleotide
  source 1..23: mol_type = other DNA
gacttycccctaggcggaaaggg

SEQ ID NO: 3825 - DNA, 23 bp, synthetic construct
  misc_feature 1..23: note = Synthetic Polynucleotide
  source 1..23: mol_type = other DNA
ggacttycccctaggcggaaagg

SEQ ID NO: 3826 - DNA, 23 bp, synthetic construct
  misc_feature 1..23: note = Synthetic Polynucleotide
  source 1..23: mol_type = other DNA
gcgaytgcagaagatgacctggg

SEQ ID NO: 3827 - DNA, 23 bp, synthetic construct
  misc_feature 1..23: note = Synthetic Polynucleotide
  source 1..23: mol_type = other DNA
tgcgaytgcagaagatgacctgg

SEQ ID NO: 3828 - DNA, 23 bp, synthetic construct
  misc_feature 1..23: note = Synthetic Polynucleotide
  source 1..23: mol_type = other DNA
ctcyctgccacgtaatacagggg

SEQ ID NO: 3829 - DNA, 23 bp, synthetic construct
  misc_feature 1..23: note = Synthetic Polynucleotide
  source 1..23: mol_type = other DNA
actcyctgccacgtaatacaggg

SEQ ID NO: 3830 - DNA, 23 bp, synthetic construct
  misc_feature 1..23: note = Synthetic Polynucleotide
  source 1..23: mol_type = other DNA
aactcyctgccacgtaatacagg

SEQ ID NO: 3831 - DNA, 23 bp, synthetic construct
  misc_feature 1..23: note = Synthetic Polynucleotide
  source 1..23: mol_type = other DNA
gggtcgyagcgaactgagaaggg

SEQ ID NO: 3832 - DNA, 23 bp, synthetic construct
  misc_feature 1..23: note = Synthetic Polynucleotide
  source 1..23: mol_type = other DNA
tgggtcgyagcgaactgagaagg

SEQ ID NO: 3833 - DNA, 23 bp, synthetic construct
  misc_feature 1..23: note = Synthetic Polynucleotide
  source 1..23: mol_type = other DNA
aacyagagtaatagcgggtcagg

SEQ ID NO: 3834 - DNA, 23 bp, synthetic construct
  misc_feature 1..23: note = Synthetic Polynucleotide
  source 1..23: mol_type = other DNA
ggatgycctgctcggtgggctgg

SEQ ID NO: 3835 - DNA, 23 bp, synthetic construct
  misc_feature 1..23: note = Synthetic Polynucleotide
  source 1..23: mol_type = other DNA
ctataytgttcatcccctctggg

SEQ ID NO: 3836 - DNA, 23 bp, synthetic construct
  misc_feature 1..23: note = Synthetic Polynucleotide
  source 1..23: mol_type = other DNA
actataytgttcatcccctctgg

SEQ ID NO: 3837 - DNA, 23 bp, synthetic construct
  misc_feature 1..23: note = Synthetic Polynucleotide
  source 1..23: mol_type = other DNA
gcatgyttgctccaacacagagg

SEQ ID NO: 3838 - DNA, 23 bp, synthetic construct
  misc_feature 1..23: note = Synthetic Polynucleotide
  source 1..23: mol_type = other DNA
ccgcayggggccgaagtctgggg

SEQ ID NO: 3839 - DNA, 23 bp, synthetic construct
  misc_feature 1..23: note = Synthetic Polynucleotide
  source 1..23: mol_type = other DNA
gccgcayggggccgaagtctggg

SEQ ID NO: 3840 - DNA, 23 bp, synthetic construct
  misc_feature 1..23: note = Synthetic Polynucleotide
  source 1..23: mol_type = other DNA
agccgcayggggccgaagtctgg

SEQ ID NO: 3841 - DNA, 23 bp, synthetic construct
  misc_feature 1..23: note = Synthetic Polynucleotide
  source 1..23: mol_type = other DNA
cggytgaactctcagtcttctgg

SEQ ID NO: 3842 - DNA, 23 bp, synthetic construct
  misc_feature 1..23: note = Synthetic Polynucleotide
  source 1..23: mol_type = other DNA
gtacttgyagtcggggtagtcgg

SEQ ID NO: 3843 - DNA, 23 bp, synthetic construct
  misc_feature 1..23: note = Synthetic Polynucleotide
  source 1..23: mol_type = other DNA
ttgytcccccctcggcctcaggg

SEQ ID NO: 3844 - DNA, 23 bp, synthetic construct
  misc_feature 1..23: note = Synthetic Polynucleotide
  source 1..23: mol_type = other DNA
attgytcccccctcggcctcagg

SEQ ID NO: 3845 - DNA, 23 bp, synthetic construct
  misc_feature 1..23: note = Synthetic Polynucleotide
  source 1..23: mol_type = other DNA
ctccyggtgctgaaggacttggg

SEQ ID NO: 3846 - DNA, 23 bp, synthetic construct
  misc_feature 1..23: note = Synthetic Polynucleotide
  source 1..23: mol_type = other DNA
gctccyggtgctgaaggacttgg

SEQ ID NO: 3847 - DNA, 23 bp, synthetic construct
  misc_feature 1..23: note = Synthetic Polynucleotide
  source 1..23: mol_type = other DNA
aatcaygatgtacatccttctgg

SEQ ID NO: 3848 - DNA, 23 bp, synthetic construct
  misc_feature 1..23: note = Synthetic Polynucleotide
  source 1..23: mol_type = other DNA
gataycggtttcattaaggtagg

SEQ ID NO: 3849 - DNA, 23 bp, synthetic construct
  misc_feature 1..23: note = Synthetic Polynucleotide
  source 1..23: mol_type = other DNA
ccacgygctgcgctggctggagg

SEQ ID NO: 3850 - DNA, 23 bp, synthetic construct
  misc_feature 1..23: note = Synthetic Polynucleotide
  source 1..23: mol_type = other DNA
acttcycaccgggtagctcccgg

SEQ ID NO: 3851 - DNA, 23 bp, synthetic construct
  misc_feature 1..23: note = Synthetic Polynucleotide
  source 1..23: mol_type = other DNA
gcayactggcggatggtccaggg

SEQ ID NO: 3852 - DNA, 23 bp, synthetic construct
  misc_feature 1..23: note = Synthetic Polynucleotide
  source 1..23: mol_type = other DNA
agcayactggcggatggtccagg

SEQ ID NO: 3853 - DNA, 23 bp, synthetic construct
  misc_feature 1..23: note = Synthetic Polynucleotide
  source 1..23: mol_type = other DNA
ggcaagygcatcaacacgctggg

SEQ ID NO: 3854 - DNA, 23 bp, synthetic construct
  misc_feature 1..23: note = Synthetic Polynucleotide
  source 1..23: mol_type = other DNA
gggcaagygcatcaacacgctgg

SEQ ID NO: 3855 - DNA, 23 bp, synthetic construct
  misc_feature 1..23: note = Synthetic Polynucleotide
  source 1..23: mol_type = other DNA
ttcygtaaaacataaaagtcagg

SEQ ID NO: 3856 - DNA, 23 bp, synthetic construct
  misc_feature 1..23: note = Synthetic Polynucleotide
  source 1..23: mol_type = other DNA
gttccyggaaagcattaagaagg

SEQ ID NO: 3857 - DNA, 23 bp, synthetic construct
  misc_feature 1..23: note = Synthetic Polynucleotide
  source 1..23: mol_type = other DNA
tagcaygaagacggtgaagacgg

SEQ ID NO: 3858 - DNA, 23 bp, synthetic construct
  misc_feature 1..23: note = Synthetic Polynucleotide
  source 1..23: mol_type = other DNA
cgtacyggcggatgccttcccgg

SEQ ID NO: 3859 - DNA, 23 bp, synthetic construct
  misc_feature 1..23: note = Synthetic Polynucleotide
  source 1..23: mol_type = other DNA
aggcccygaggaagcagggacgg

SEQ ID NO: 3860 - DNA, 23 bp, synthetic construct
  misc_feature 1..23: note = Synthetic Polynucleotide
  source 1..23: mol_type = other DNA
ctcayggcacttacctgggatgg

SEQ ID NO: 3861 - DNA, 23 bp, synthetic construct
  misc_feature 1..23: note = Synthetic Polynucleotide
  source 1..23: mol_type = other DNA
tcacagcygcggggaaagggagg

SEQ ID NO: 3862 - DNA, 23 bp, synthetic construct
  misc_feature 1..23: note = Synthetic Polynucleotide
  source 1..23: mol_type = other DNA
caagtygttagctgccaacaagg

SEQ ID NO: 3863 - DNA, 23 bp, synthetic construct
  misc_feature 1..23: note = Synthetic Polynucleotide
  source 1..23: mol_type = other DNA
ggtaccyggaagacacgaggggg

SEQ ID NO: 3864 - DNA, 23 bp, synthetic construct
  misc_feature 1..23: note = Synthetic Polynucleotide
  source 1..23: mol_type = other DNA
tggtaccyggaagacacgagggg

SEQ ID NO: 3865 - DNA, 23 bp, synthetic construct
  misc_feature 1..23: note = Synthetic Polynucleotide
  source 1..23: mol_type = other DNA
agggytggagtaggggccatcgg

SEQ ID NO: 3866 - DNA, 23 bp, synthetic construct
  misc_feature 1..23: note = Synthetic Polynucleotide
  source 1..23: mol_type = other DNA
tgccaytgtaattcccacacagg

SEQ ID NO: 3867 - DNA, 23 bp, synthetic construct
  misc_feature 1..23: note = Synthetic Polynucleotide
  source 1..23: mol_type = other DNA
attycaatggcttctgggtctgg

SEQ ID NO: 3868 - DNA, 23 bp, synthetic construct
  misc_feature 1..23: note = Synthetic Polynucleotide
  source 1..23: mol_type = other DNA
atayctggccgcgcttccccagg

SEQ ID NO: 3869 - DNA, 23 bp, synthetic construct
  misc_feature 1..23: note = Synthetic Polynucleotide
  source 1..23: mol_type = other DNA
cgctcaygctgcaggctggacgg

SEQ ID NO: 3870 - DNA, 23 bp, synthetic construct
  misc_feature 1..23: note = Synthetic Polynucleotide
  source 1..23: mol_type = other DNA
gtacytgtccccgtagccaatgg

SEQ ID NO: 3871 - DNA, 23 bp, synthetic construct
  misc_feature 1..23: note = Synthetic Polynucleotide
  source 1..23: mol_type = other DNA
gataycatacaggaatgctgggg

SEQ ID NO: 3872 - DNA, 23 bp, synthetic construct
  misc_feature 1..23: note = Synthetic Polynucleotide
  source 1..23: mol_type = other DNA
agataycatacaggaatgctggg

SEQ ID NO: 3873 - DNA, 23 bp, synthetic construct
  misc_feature 1..23: note = Synthetic Polynucleotide
  source 1..23: mol_type = other DNA
tagataycatacaggaatgctgg

SEQ ID NO: 3874 - DNA, 23 bp, synthetic construct
  misc_feature 1..23: note = Synthetic Polynucleotide
  source 1..23: mol_type = other DNA
cacccyaaagaagaagtggtcgg

SEQ ID NO: 3875 - DNA, 23 bp, synthetic construct
  misc_feature 1..23: note = Synthetic Polynucleotide
  source 1..23: mol_type = other DNA
aataaagyagaatatcgtcaagg

SEQ ID NO: 3876 - DNA, 23 bp, synthetic construct
  misc_feature 1..23: note = Synthetic Polynucleotide
  source 1..23: mol_type = other DNA
tttacagygggctctagaggggg

SEQ ID NO: 3877 - DNA, 23 bp, synthetic construct
  misc_feature 1..23: note = Synthetic Polynucleotide
  source 1..23: mol_type = other DNA
ctgycttccttcacctctgctgg

SEQ ID NO: 3878 - DNA, 23 bp, synthetic construct
  misc_feature 1..23: note = Synthetic Polynucleotide
  source 1..23: mol_type = other DNA
agccytgggaaggggggcagcgg

SEQ ID NO: 3879 - DNA, 23 bp, synthetic construct
  misc_feature 1..23: note = Synthetic Polynucleotide
  source 1..23: mol_type = other DNA
ggcccggytggtgtaatacacgg

SEQ ID NO: 3880 - DNA, 23 bp, synthetic construct
  misc_feature 1..23: note = Synthetic Polynucleotide
  source 1..23: mol_type = other DNA
gtatcygggagataggacagagg

SEQ ID NO: 3881 - DNA, 23 bp, synthetic construct
  misc_feature 1..23: note = Synthetic Polynucleotide
  source 1..23: mol_type = other DNA
cacaytgacacatgtggccaggg

SEQ ID NO: 3882 - DNA, 23 bp, synthetic construct
  misc_feature 1..23: note = Synthetic Polynucleotide
  source 1..23: mol_type = other DNA
ccacaytgacacatgtggccagg

SEQ ID NO: 3883 - DNA, 23 bp, synthetic construct
  misc_feature 1..23: note = Synthetic Polynucleotide
  source 1..23: mol_type = other DNA
gcaccayggtgcctggcgggagg

SEQ ID NO: 3884 - DNA, 23 bp, synthetic construct
  misc_feature 1..23: note = Synthetic Polynucleotide
  source 1..23: mol_type = other DNA
agatcyccactgtggttgcctgg

SEQ ID NO: 3885 - DNA, 23 bp, synthetic construct
  misc_feature 1..23: note = Synthetic Polynucleotide
  source 1..23: mol_type = other DNA
aggcccaytgccatacaggatgg

SEQ ID NO: 3886 - DNA, 23 bp, synthetic construct
  misc_feature 1..23: note = Synthetic Polynucleotide
  source 1..23: mol_type = other DNA
gcagyccacccacagccccatgg

SEQ ID NO: 3887 - DNA, 23 bp, synthetic construct
  misc_feature 1..23: note = Synthetic Polynucleotide
  source 1..23: mol_type = other DNA
ggagyaggggctcagcagggcgg

SEQ ID NO: 3888 - DNA, 23 bp, synthetic construct
  misc_feature 1..23: note = Synthetic Polynucleotide
  source 1..23: mol_type = other DNA
ataggagyaggggctcagcaggg

SEQ ID NO: 3889 - DNA, 23 bp, synthetic construct
  misc_feature 1..23: note = Synthetic Polynucleotide
  source 1..23: mol_type = other DNA
cggcaayggtgtagcggcggggg

SEQ ID NO: 3890 - DNA, 23 bp, synthetic construct
  misc_feature 1..23: note = Synthetic Polynucleotide
  source 1..23: mol_type = other DNA
gcggcaayggtgtagcggcgggg

SEQ ID NO: 3891 - DNA, 23 bp, synthetic construct
  misc_feature 1..23: note = Synthetic Polynucleotide
  source 1..23: mol_type = other DNA
cgactyggagagacgcctgcagg

SEQ ID NO: 3892 - DNA, 23 bp, synthetic construct
  misc_feature 1..23: note = Synthetic Polynucleotide
  source 1..23: mol_type = other DNA
gacatytggagggtccccgatgg

SEQ ID NO: 3893 - DNA, 23 bp, synthetic construct
  misc_feature 1..23: note = Synthetic Polynucleotide
  source 1..23: mol_type = other DNA
atatcayctagagggaagggggg

SEQ ID NO: 3894 - DNA, 23 bp, synthetic construct
  misc_feature 1..23: note = Synthetic Polynucleotide
  source 1..23: mol_type = other DNA
catatcayctagagggaaggggg

SEQ ID NO: 3895 - DNA, 23 bp, synthetic construct
  misc_feature 1..23: note = Synthetic Polynucleotide
  source 1..23: mol_type = other DNA
ctgaagytggtctgacctcaggg

SEQ ID NO: 3896 - DNA, 23 bp, synthetic construct
  misc_feature 1..23: note = Synthetic Polynucleotide
  source 1..23: mol_type = other DNA
gctgaagytggtctgacctcagg

SEQ ID NO: 3897 - DNA, 23 bp, synthetic construct
  misc_feature 1..23: note = Synthetic Polynucleotide
  source 1..23: mol_type = other DNA
tgctygatccactggatgtgggg

SEQ ID NO: 3898 - DNA, 23 bp, synthetic construct
  misc_feature 1..23: note = Synthetic Polynucleotide
  source 1..23: mol_type = other DNA
gtgctygatccactggatgtggg

SEQ ID NO: 3899 - DNA, 23 bp, synthetic construct
  misc_feature 1..23: note = Synthetic Polynucleotide
  source 1..23: mol_type = other DNA
cgtgctygatccactggatgtgg

SEQ ID NO: 3900 - DNA, 23 bp, synthetic construct
  misc_feature 1..23: note = Synthetic Polynucleotide
  source 1..23: mol_type = other DNA
gataggyacatatcaaaccaggg

SEQ ID NO: 3901 - DNA, 23 bp, synthetic construct
  misc_feature 1..23: note = Synthetic Polynucleotide
  source 1..23: mol_type = other DNA
agataggyacatatcaaaccagg

SEQ ID NO: 3902 - DNA, 23 bp, synthetic construct
  misc_feature 1..23: note = Synthetic Polynucleotide
  source 1..23: mol_type = other DNA
agaytaccaccacctggtggagg

SEQ ID NO: 3903 - DNA, 23 bp, synthetic construct
  misc_feature 1..23: note = Synthetic Polynucleotide
  source 1..23: mol_type = other DNA
ccaagaytaccaccacctggtgg

SEQ ID NO: 3904 - DNA, 23 bp, synthetic construct
  misc_feature 1..23: note = Synthetic Polynucleotide
  source 1..23: mol_type = other DNA
cgccagcygcatttcaaagatgg

SEQ ID NO: 3905 - DNA, 23 bp, synthetic construct
  misc_feature 1..23: note = Synthetic Polynucleotide
  source 1..23: mol_type = other DNA
tagcayatttgcaacaagcttgg

SEQ ID NO: 3906 - DNA, 23 bp, synthetic construct
  misc_feature 1..23: note = Synthetic Polynucleotide
  source 1..23: mol_type = other DNA
gcgggyacttggtgtggatgagg

SEQ ID NO: 3907 - DNA, 23 bp, synthetic construct
  misc_feature 1..23: note = Synthetic Polynucleotide
  source 1..23: mol_type = other DNA
ctgycagggtcaggcacacctgg

SEQ ID NO: 3908 - DNA, 23 bp, synthetic construct
  misc_feature 1..23: note = Synthetic Polynucleotide
  source 1..23: mol_type = other DNA
gcagaccygcacaaaatacaagg

SEQ ID NO: 3909 - DNA, 23 bp, synthetic construct
  misc_feature 1..23: note = Synthetic Polynucleotide
  source 1..23: mol_type = other DNA
cttcaygtgcaggaagcggctgg

SEQ ID NO: 3910 - DNA, 23 bp, synthetic construct
  misc_feature 1..23: note = Synthetic Polynucleotide
  source 1..23: mol_type = other DNA
ccacctycatgtgcaggaagcgg

SEQ ID NO: 3911 - DNA, 23 bp, synthetic construct
  misc_feature 1..23: note = Synthetic Polynucleotide
  source 1..23: mol_type = other DNA
atagatgycagcacgtttgaagg

SEQ ID NO: 3912 - DNA, 23 bp, synthetic construct
  misc_feature 1..23: note = Synthetic Polynucleotide
  source 1..23: mol_type = other DNA
ccgttcygtgggtatagagtggg

SEQ ID NO: 3913 - DNA, 23 bp, synthetic construct
  misc_feature 1..23: note = Synthetic Polynucleotide
  source 1..23: mol_type = other DNA
gccgttcygtgggtatagagtgg

SEQ ID NO: 3914 - DNA, 23 bp, synthetic construct
  misc_feature 1..23: note = Synthetic Polynucleotide
  source 1..23: mol_type = other DNA
accygagagggagggcagccagg

SEQ ID NO: 3915 - DNA, 23 bp, synthetic construct
  misc_feature 1..23: note = Synthetic Polynucleotide
  source 1..23: mol_type = other DNA
gccygaaaacacagccacagagg

SEQ ID NO: 3916 - DNA, 23 bp, synthetic construct
  misc_feature 1..23: note = Synthetic Polynucleotide
  source 1..23: mol_type = other DNA
ccaygttgtcaatgtccagctgg

SEQ ID NO: 3917 - DNA, 23 bp, synthetic construct
  misc_feature 1..23: note = Synthetic Polynucleotide
  source 1..23: mol_type = other DNA
ctttcygttgaaataaggatggg

SEQ ID NO: 3918 - DNA, 23 bp, synthetic construct
  misc_feature 1..23: note = Synthetic Polynucleotide
  source 1..23: mol_type = other DNA
tctttcygttgaaataaggatgg

SEQ ID NO: 3919 - DNA, 23 bp, synthetic construct
  misc_feature 1..23: note = Synthetic Polynucleotide
  source 1..23: mol_type = other DNA
cacygagggaaagcactgcaggg

SEQ ID NO: 3920 - DNA, 23 bp, synthetic construct
  misc_feature 1..23: note = Synthetic Polynucleotide
  source 1..23: mol_type = other DNA
gcacygagggaaagcactgcagg

SEQ ID NO: 3921 - DNA, 23 bp, synthetic construct
  misc_feature 1..23: note = Synthetic Polynucleotide
  source 1..23: mol_type = other DNA
ggtcttyctgcacatttgggtgg

SEQ ID NO: 3922 - DNA, 23 bp, synthetic construct
  misc_feature 1..23: note = Synthetic Polynucleotide
  source 1..23: mol_type = other DNA
cagyagagcttgcggcgccgggg

SEQ ID NO: 3923 - DNA, 23 bp, synthetic construct
  misc_feature 1..23: note = Synthetic Polynucleotide
  source 1..23: mol_type = other DNA
gcagyagagcttgcggcgccggg

SEQ ID NO: 3924 - DNA, 23 bp, synthetic construct
  misc_feature 1..23: note = Synthetic Polynucleotide
  source 1..23: mol_type = other DNA
cgcagyagagcttgcggcgccgg

SEQ ID NO: 3925 - DNA, 23 bp, synthetic construct
  misc_feature 1..23: note = Synthetic Polynucleotide
  source 1..23: mol_type = other DNA
gtgaaccygaaatgagagggagg

SEQ ID NO: 3926 - DNA, 23 bp, synthetic construct
  misc_feature 1..23: note = Synthetic Polynucleotide
  source 1..23: mol_type = other DNA
gtaccygggtgggggccgcaggg

SEQ ID NO: 3927 - DNA, 23 bp, synthetic construct
  misc_feature 1..23: note = Synthetic Polynucleotide
  source 1..23: mol_type = other DNA
tgtaccygggtgggggccgcagg

SEQ ID NO: 3928 - DNA, 23 bp, synthetic construct
  misc_feature 1..23: note = Synthetic Polynucleotide
  source 1..23: mol_type = other DNA
tcayctttcatgggctcttttgg

SEQ ID NO: 3929 - DNA, 23 bp, synthetic construct
  misc_feature 1..23: note = Synthetic Polynucleotide
  source 1..23: mol_type = other DNA
tatttyacatagttggaatgtgg

SEQ ID NO: 3930 - DNA, 23 bp, synthetic construct
  misc_feature 1..23: note = Synthetic Polynucleotide
  source 1..23: mol_type = other DNA
ggccaayttcctgtaattggggg

SEQ ID NO: 3931 - DNA, 23 bp, synthetic construct
  misc_feature 1..23: note = Synthetic Polynucleotide
  source 1..23: mol_type = other DNA
aggccaayttcctgtaattgggg

SEQ ID NO: 3932 - DNA, 23 bp, synthetic construct
  misc_feature 1..23: note = Synthetic Polynucleotide
  source 1..23: mol_type = other DNA
tccayggcgggtgcgggctcagg

SEQ ID NO: 3933 - DNA, 23 bp, synthetic construct
  misc_feature 1..23: note = Synthetic Polynucleotide
  source 1..23: mol_type = other DNA
aggcgtygaccagcgagtacagg

SEQ ID NO: 3934 - DNA, 23 bp, synthetic construct
  misc_feature 1..23: note = Synthetic Polynucleotide
  source 1..23: mol_type = other DNA
gcccycctcgtgctccagggagg

SEQ ID NO: 3935 - DNA, 23 bp, synthetic construct
  misc_feature 1..23: note = Synthetic Polynucleotide
  source 1..23: mol_type = other DNA
cttgcccycctcgtgctccaggg

SEQ ID NO: 3936 - DNA, 23 bp, synthetic construct
  misc_feature 1..23: note = Synthetic Polynucleotide
  source 1..23: mol_type = other DNA
tgatcaygcagtgtccagaaggg

SEQ ID NO: 3937 - DNA, 23 bp, synthetic construct
  misc_feature 1..23: note = Synthetic Polynucleotide
  source 1..23: mol_type = other DNA
gtgatcaygcagtgtccagaagg

SEQ ID NO: 3938 - DNA, 23 bp, synthetic construct
  misc_feature 1..23: note = Synthetic Polynucleotide
  source 1..23: mol_type = other DNA
gtacyggtcatagggcagcatgg

SEQ ID NO: 3939 - DNA, 23 bp, synthetic construct
  misc_feature 1..23: note = Synthetic Polynucleotide
  source 1..23: mol_type = other DNA
ctcyagggccgcaggttggaggg

SEQ ID NO: 3940 - DNA, 23 bp, synthetic construct
  misc_feature 1..23: note = Synthetic Polynucleotide
  source 1..23: mol_type = other DNA
gctcyagggccgcaggttggagg

SEQ ID NO: 3941 - DNA, 23 bp, synthetic construct
  misc_feature 1..23: note = Synthetic Polynucleotide
  source 1..23: mol_type = other DNA
ggcgctcyagggccgcaggttgg

SEQ ID NO: 3942 - DNA, 23 bp, synthetic construct
  misc_feature 1..23: note = Synthetic Polynucleotide
  source 1..23: mol_type = other DNA
ttccttcyggacagcagaagagg

SEQ ID NO: 3943 - DNA, 23 bp, synthetic construct
  misc_feature 1..23: note = Synthetic Polynucleotide
  source 1..23: mol_type = other DNA
cgcggytgagggtgtagaagtgg

SEQ ID NO: 3944 - DNA, 23 bp, synthetic construct
  misc_feature 1..23: note = Synthetic Polynucleotide
  source 1..23: mol_type = other DNA
aatggatyctgaatgtacagagg

SEQ ID NO: 3945 - DNA, 23 bp, synthetic construct
  misc_feature 1..23: note = Synthetic Polynucleotide
  source 1..23: mol_type = other DNA
acagtyttaggacatcattgtgg

SEQ ID NO: 3946 - DNA, 23 bp, synthetic construct
  misc_feature 1..23: note = Synthetic Polynucleotide
  source 1..23: mol_type = other DNA
gctgcygccctcgcaccactggg

SEQ ID NO: 3947 - DNA, 23 bp, synthetic construct
  misc_feature 1..23: note = Synthetic Polynucleotide
  source 1..23: mol_type = other DNA
ggctgcygccctcgcaccactgg

SEQ ID NO: 3948 - DNA, 23 bp, synthetic construct
  misc_feature 1..23: note = Synthetic Polynucleotide
  source 1..23: mol_type = other DNA
aagctcygaggtcctgggggagg

SEQ ID NO: 3949 - DNA, 23 bp, synthetic construct
  misc_feature 1..23: note = Synthetic Polynucleotide
  source 1..23: mol_type = other DNA
tacycatggtgactcaagcctgg

SEQ ID NO: 3950 - DNA, 23 bp, synthetic construct
  misc_feature 1..23: note = Synthetic Polynucleotide
  source 1..23: mol_type = other DNA
gcagcccyaggaagtccagaagg

SEQ ID NO: 3951 - DNA, 23 bp, synthetic construct
  misc_feature 1..23: note = Synthetic Polynucleotide
  source 1..23: mol_type = other DNA
agccyacgggaaaagaactgtgg

SEQ ID NO: 3952 - DNA, 23 bp, synthetic construct
  misc_feature 1..23: note = Synthetic Polynucleotide
  source 1..23: mol_type = other DNA
aggtatcygaaacagaaggttgg

SEQ ID NO: 3953 - DNA, 23 bp, synthetic construct
  misc_feature 1..23: note = Synthetic Polynucleotide
  source 1..23: mol_type = other DNA
gaatcgtyctgcaggagaggggg

SEQ ID NO: 3954 - DNA, 23 bp, synthetic construct
  misc_feature 1..23: note = Synthetic Polynucleotide
  source 1..23: mol_type = other DNA
caggtacygcacatctagactgg

SEQ ID NO: 3955 - DNA, 23 bp, synthetic construct
  misc_feature 1..23: note = Synthetic Polynucleotide
  source 1..23: mol_type = other DNA
gttattcyccaatggtgattggg

SEQ ID NO: 3956 - DNA, 23 bp, synthetic construct
  misc_feature 1..23: note = Synthetic Polynucleotide
  source 1..23: mol_type = other DNA
tcatcayctgaggcacgatacgg

SEQ ID NO: 3957 - DNA, 23 bp, synthetic construct
  misc_feature 1..23: note = Synthetic Polynucleotide
  source 1..23: mol_type = other DNA
tgctacaytacctgaggtacagg

SEQ ID NO: 3958 - DNA, 23 bp, synthetic construct
  misc_feature 1..23: note = Synthetic Polynucleotide
  source 1..23: mol_type = other DNA
ttaagttytatgcgattaccggg

SEQ ID NO: 3959 - DNA, 23 bp, synthetic construct
  misc_feature 1..23: note = Synthetic Polynucleotide
  source 1..23: mol_type = other DNA
cacgytcaccttgccccacaggg

SEQ ID NO: 3960 - DNA, 23 bp, synthetic construct
  misc_feature 1..23: note = Synthetic Polynucleotide
  source 1..23: mol_type = other DNA
ccacgytcaccttgccccacagg

SEQ ID NO: 3961 - DNA, 23 bp, synthetic construct
  misc_feature 1..23: note = Synthetic Polynucleotide
  source 1..23: mol_type = other DNA
acacaygtagttgtagtggatgg

SEQ ID NO: 3962 - DNA, 23 bp, synthetic construct
  misc_feature 1..23: note = Synthetic Polynucleotide
  source 1..23: mol_type = other DNA
ggcttgyctgggatggtcacagg

SEQ ID NO: 3963 - DNA, 23 bp, synthetic construct
  misc_feature 1..23: note = Synthetic Polynucleotide
  source 1..23: mol_type = other DNA
gatcaygatggtgatgtcgaagg

SEQ ID NO: 3964 - DNA, 23 bp, synthetic construct
  misc_feature 1..23: note = Synthetic Polynucleotide
  source 1..23: mol_type = other DNA
ccatcayggtgaccatgttgagg

SEQ ID NO: 3965 - DNA, 23 bp, synthetic construct
  misc_feature 1..23: note = Synthetic Polynucleotide
  source 1..23: mol_type = other DNA
tgtacaygttgaccacgatgagg

SEQ ID NO: 3966 - DNA, 23 bp, synthetic construct
  misc_feature 1..23: note = Synthetic Polynucleotide
  source 1..23: mol_type = other DNA
tatgyccagctgctgtaacctgg

SEQ ID NO: 3967 - DNA, 23 bp, synthetic construct
  misc_feature 1..23: note = Synthetic Polynucleotide
  source 1..23: mol_type = other DNA
gatctcgyagtaggatgccatgg

SEQ ID NO: 3968 - DNA, 23 bp, synthetic construct
  misc_feature 1..23: note = Synthetic Polynucleotide
  source 1..23: mol_type = other DNA
gcaycacaaaattgtacctgggg

SEQ ID NO: 3969 - DNA, 23 bp, synthetic construct
  misc_feature 1..23: note = Synthetic Polynucleotide
  source 1..23: mol_type = other DNA
agcaycacaaaattgtacctggg

SEQ ID NO: 3970 - DNA, 23 bp, synthetic construct
  misc_feature 1..23: note = Synthetic Polynucleotide
  source 1..23: mol_type = other DNA
cagcaycacaaaattgtacctgg

SEQ ID NO: 3971 - DNA, 23 bp, synthetic construct
  misc_feature 1..23: note = Synthetic Polynucleotide
  source 1..23: mol_type = other DNA
aaccygtatgagaaaacaatggg

SEQ ID NO: 3972 - DNA, 23 bp, synthetic construct
  misc_feature 1..23: note = Synthetic Polynucleotide
  source 1..23: mol_type = other DNA
taaccygtatgagaaaacaatgg

SEQ ID NO: 3973 - DNA, 23 bp, synthetic construct
  misc_feature 1..23: note = Synthetic Polynucleotide
  source 1..23: mol_type = other DNA
agccygtgcaaacaggggaatgg

SEQ ID NO: 3974 - DNA, 23 bp, synthetic construct
  misc_feature 1..23: note = Synthetic Polynucleotide
  source 1..23: mol_type = other DNA
ggctcygggggcagagtcagggg

SEQ ID NO: 3975 - DNA, 23 bp, synthetic construct
  misc_feature 1..23: note = Synthetic Polynucleotide
  source 1..23: mol_type = other DNA
gggctcygggggcagagtcaggg

SEQ ID NO: 3976 - DNA, 23 bp, synthetic construct
  misc_feature 1..23: note = Synthetic Polynucleotide
  source 1..23: mol_type = other DNA
agggctcygggggcagagtcagg

SEQ ID NO: 3977 - DNA, 23 bp, synthetic construct
  misc_feature 1..23: note = Synthetic Polynucleotide
  source 1..23: mol_type = other DNA
ccgccaycagcgtgtcgccacgg

SEQ ID NO: 3978 - DNA, 23 bp, synthetic construct
  misc_feature 1..23: note = Synthetic Polynucleotide
  source 1..23: mol_type = other DNA
atgyccacggactttccataggg

SEQ ID NO: 3979 - DNA, 23 bp, synthetic construct
  misc_feature 1..23: note = Synthetic Polynucleotide
  source 1..23: mol_type = other DNA
catgyccacggactttccatagg

SEQ ID NO: 3980 - DNA, 23 bp, synthetic construct
  misc_feature 1..23: note = Synthetic Polynucleotide
  source 1..23: mol_type = other DNA
acacacayattcatcatcatggg

SEQ ID NO: 3981 - DNA, 23 bp, synthetic construct
  misc_feature 1..23: note = Synthetic Polynucleotide
  source 1..23: mol_type = other DNA
ttaccyggcagtgggggtggggg

SEQ ID NO: 3982 - DNA, 23 bp, synthetic construct
  misc_feature 1..23: note = Synthetic Polynucleotide
  source 1..23: mol_type = other DNA
cttaccyggcagtgggggtgggg

SEQ ID NO: 3983 - DNA, 23 bp, synthetic construct
  misc_feature 1..23: note = Synthetic Polynucleotide
  source 1..23: mol_type = other DNA
ccttaccyggcagtgggggtggg

SEQ ID NO: 3984 - DNA, 23 bp, synthetic construct
  misc_feature 1..23: note = Synthetic Polynucleotide
  source 1..23: mol_type = other DNA
ttctcccyggaacacaaaacagg

SEQ ID NO: 3985 - DNA, 23 bp, synthetic construct
  misc_feature 1..23: note = Synthetic Polynucleotide
  source 1..23: mol_type = other DNA
gaatgtaygataatgaacggagg

SEQ ID NO: 3986 - DNA, 23 bp, synthetic construct
  misc_feature 1..23: note = Synthetic Polynucleotide
  source 1..23: mol_type = other DNA
gcagttcygtgggggaatgaagg

SEQ ID NO: 3987 - DNA, 23 bp, synthetic construct
  misc_feature 1..23: note = Synthetic Polynucleotide
  source 1..23: mol_type = other DNA
tggttyggcatcatagtgctggg

SEQ ID NO: 3988 - DNA, 23 bp, synthetic construct
  misc_feature 1..23: note = Synthetic Polynucleotide
  source 1..23: mol_type = other DNA
gtggttyggcatcatagtgctgg

SEQ ID NO: 3989 - DNA, 23 bp, synthetic construct
  misc_feature 1..23: note = Synthetic Polynucleotide
  source 1..23: mol_type = other DNA
cccacyggggagaagggcagggg

SEQ ID NO: 3990 - DNA, 23 bp, synthetic construct
  misc_feature 1..23: note = Synthetic Polynucleotide
  source 1..23: mol_type = other DNA
gcccacyggggagaagggcaggg

SEQ ID NO: 3991 - DNA, 23 bp, synthetic construct
  misc_feature 1..23: note = Synthetic Polynucleotide
  source 1..23: mol_type = other DNA
ggcccacyggggagaagggcagg

SEQ ID NO: 3992 - DNA, 23 bp, synthetic construct
  misc_feature 1..23: note = Synthetic Polynucleotide
  source 1..23: mol_type = other DNA
acayaggtgcgacggccccaggg

SEQ ID NO: 3993 - DNA, 23 bp, synthetic construct
  misc_feature 1..23: note = Synthetic Polynucleotide
  source 1..23: mol_type = other DNA
gacayaggtgcgacggccccagg

SEQ ID NO: 3994 - DNA, 23 bp, synthetic construct
  misc_feature 1..23: note = Synthetic Polynucleotide
  source 1..23: mol_type = other DNA
acayatatccctctggacattgg

SEQ ID NO: 3995 - DNA, 23 bp, synthetic construct
  misc_feature 1..23: note = Synthetic Polynucleotide
  source 1..23: mol_type = other DNA
cagagcayagaccaagaaaaagg

SEQ ID NO: 3996 - DNA, 23 bp, synthetic construct
  misc_feature 1..23: note = Synthetic Polynucleotide
  source 1..23: mol_type = other DNA
cgaggyggtggtggtccaagtgg

SEQ ID NO: 3997 - DNA, 23 bp, synthetic construct
  misc_feature 1..23: note = Synthetic Polynucleotide
  source 1..23: mol_type = other DNA
tcaacayaatatttctaggcagg

SEQ ID NO: 3998 - DNA, 23 bp, synthetic construct
  misc_feature 1..23: note = Synthetic Polynucleotide
  source 1..23: mol_type = other DNA
gataytcacaattacaactgggg

SEQ ID NO: 3999 - DNA, 23 bp, synthetic construct
  misc_feature 1..23: note = Synthetic Polynucleotide
  source 1..23: mol_type = other DNA
agataytcacaattacaactggg

SEQ ID NO: 4000 - DNA, 23 bp, synthetic construct
  misc_feature 1..23: note = Synthetic Polynucleotide
  source 1..23: mol_type = other DNA
gagataytcacaattacaactgg

SEQ ID NO: 4001 - DNA, 23 bp, synthetic construct
  misc_feature 1..23: note = Synthetic Polynucleotide
  source 1..23: mol_type = other DNA
aagyctcaggattggtccgaagg

SEQ ID NO: 4002 - DNA, 23 bp, synthetic construct
  misc_feature 1..23: note = Synthetic Polynucleotide
  source 1..23: mol_type = other DNA
ctayactcccagcctgggggagg

SEQ ID NO: 4003 - DNA, 23 bp, synthetic construct
  misc_feature 1..23: note = Synthetic Polynucleotide
  source 1..23: mol_type = other DNA
atgctayactcccagcctggggg

SEQ ID NO: 4004 - DNA, 23 bp, synthetic construct
  misc_feature 1..23: note = Synthetic Polynucleotide
  source 1..23: mol_type = other DNA
gatgctayactcccagcctgggg

SEQ ID NO: 4005 - DNA, 23 bp, synthetic construct
  misc_feature 1..23: note = Synthetic Polynucleotide
  source 1..23: mol_type = other DNA
aggtgagyaatctgtcagcaggg

SEQ ID NO: 4006 - DNA, 23 bp, synthetic construct
  misc_feature 1..23: note = Synthetic Polynucleotide
  source 1..23: mol_type = other DNA
tctygaaccaaacctgggggcgg

SEQ ID NO: 4007 - DNA, 23 bp, synthetic construct
  misc_feature 1..23: note = Synthetic Polynucleotide
  source 1..23: mol_type = other DNA
gattctygaaccaaacctggggg

SEQ ID NO: 4008 - DNA, 23 bp, synthetic construct
  misc_feature 1..23: note = Synthetic Polynucleotide
  source 1..23: mol_type = other DNA
cgattctygaaccaaacctgggg

SEQ ID NO: 4009 - DNA, 23 bp, synthetic construct
  misc_feature 1..23: note = Synthetic Polynucleotide
  source 1..23: mol_type = other DNA
agtgcytgtccagctcgggtggg

SEQ ID NO: 4010 - DNA, 23 bp, synthetic construct
  misc_feature 1..23: note = Synthetic Polynucleotide
  source 1..23: mol_type = other DNA
aagtgcytgtccagctcgggtgg

SEQ ID NO: 4011 - DNA, 23 bp, synthetic construct
  misc_feature 1..23: note = Synthetic Polynucleotide
  source 1..23: mol_type = other DNA
ttccyggggccagcagagaaggg

SEQ ID NO: 4012 - DNA, 23 bp, synthetic construct
  misc_feature 1..23: note = Synthetic Polynucleotide
  source 1..23: mol_type = other DNA
gttccyggggccagcagagaagg

SEQ ID NO: 4013 - DNA, 23 bp, synthetic construct
  misc_feature 1..23: note = Synthetic Polynucleotide
  source 1..23: mol_type = other DNA
caccygagtaagataaagaaagg

SEQ ID NO: 4014 - DNA, 23 bp, synthetic construct
  misc_feature 1..23: note = Synthetic Polynucleotide
  source 1..23: mol_type = other DNA
acccyaaaagaagccatcaatgg

SEQ ID NO: 4015 - DNA, 23 bp, synthetic construct
  misc_feature 1..23: note = Synthetic Polynucleotide
  source 1..23: mol_type = other DNA
tacygtgggcagagaaggggagg

SEQ ID NO: 4016 - DNA, 23 bp, synthetic construct
  misc_feature 1..23: note = Synthetic Polynucleotide
  source 1..23: mol_type = other DNA
aggtacygtgggcagagaagggg

SEQ ID NO: 4017 - DNA, 23 bp, synthetic construct
  misc_feature 1..23: note = Synthetic Polynucleotide
  source 1..23: mol_type = other DNA
caggtacygtgggcagagaaggg

SEQ ID NO: 4018 - DNA, 23 bp, synthetic construct
  misc_feature 1..23: note = Synthetic Polynucleotide
  source 1..23: mol_type = other DNA
gcaggtyaccatctcctggaggg

SEQ ID NO: 4019 - DNA, 23 bp, synthetic construct
  misc_feature 1..23: note = Synthetic Polynucleotide
  source 1..23: mol_type = other DNA
tgcaggtyaccatctcctggagg

SEQ ID NO: 4020 - DNA, 23 bp, synthetic construct
  misc_feature 1..23: note = Synthetic Polynucleotide
  source 1..23: mol_type = other DNA
gaacayagcttttctgggggagg

SEQ ID NO: 4021 - DNA, 23 bp, synthetic construct
  misc_feature 1..23: note = Synthetic Polynucleotide
  source 1..23: mol_type = other DNA
gagtygcaccaaaatttttgggg

SEQ ID NO: 4022 - DNA, 23 bp, synthetic construct
  misc_feature 1..23: note = Synthetic Polynucleotide
  source 1..23: mol_type = other DNA
ggagtygcaccaaaatttttggg

SEQ ID NO: 4023 - DNA, 23 bp, synthetic construct
  misc_feature 1..23: note = Synthetic Polynucleotide
  source 1..23: mol_type = other DNA
tggagtygcaccaaaatttttgg

SEQ ID NO: 4024 - DNA, 23 bp, synthetic construct
  misc_feature 1..23: note = Synthetic Polynucleotide
  source 1..23: mol_type = other DNA
acayatttcttaggtttgagggg

SEQ ID NO: 4025 - DNA, 23 bp, synthetic construct
  misc_feature 1..23: note = Synthetic Polynucleotide
  source 1..23: mol_type = other DNA
gacayatttcttaggtttgaggg

SEQ ID NO: 4026 - DNA, 23 bp, synthetic construct
  misc_feature 1..23: note = Synthetic Polynucleotide
  source 1..23: mol_type = other DNA
agacayatttcttaggtttgagg

SEQ ID NO: 4027 - DNA, 23 bp, synthetic construct
  misc_feature 1..23: note = Synthetic Polynucleotide
  source 1..23: mol_type = other DNA
tgactgyggggcgctccttatgg

SEQ ID NO: 4028 - DNA, 23 bp, synthetic construct
  misc_feature 1..23: note = Synthetic Polynucleotide
  source 1..23: mol_type = other DNA
agtgtacytgacagcaatggtgg

SEQ ID NO: 4029 - DNA, 23 bp, synthetic construct
  misc_feature 1..23: note = Synthetic Polynucleotide
  source 1..23: mol_type = other DNA
cgcycagcaggggtcagctcagg

SEQ ID NO: 4030 - DNA, 23 bp, synthetic construct
  misc_feature 1..23: note = Synthetic Polynucleotide
  source 1..23: mol_type = other DNA
gatcayggccgagtagtcccggg

SEQ ID NO: 4031 - DNA, 23 bp, synthetic construct
  misc_feature 1..23: note = Synthetic Polynucleotide
  source 1..23: mol_type = other DNA
tgatcayggccgagtagtcccgg

SEQ ID NO: 4032 - DNA, 23 bp, synthetic construct
  misc_feature 1..23: note = Synthetic Polynucleotide
  source 1..23: mol_type = other DNA
agcccaygccgcccaggatctgg

SEQ ID NO: 4033 - DNA, 23 bp, synthetic construct
  misc_feature 1..23: note = Synthetic Polynucleotide
  source 1..23: mol_type = other DNA
accgcggygaggacctctgtggg

SEQ ID NO: 4034 - DNA, 23 bp, synthetic construct
  misc_feature 1..23: note = Synthetic Polynucleotide
  source 1..23: mol_type = other DNA
tgcyggcccatacctgtcaaggg

SEQ ID NO: 4035 - DNA, 23 bp, synthetic construct
  misc_feature 1..23: note = Synthetic Polynucleotide
  source 1..23: mol_type = other DNA
ctgcyggcccatacctgtcaagg

SEQ ID NO: 4036 - DNA, 23 bp, synthetic construct
  misc_feature 1..23: note = Synthetic Polynucleotide
  source 1..23: mol_type = other DNA
gagygcacatctttttcctaggg

SEQ ID NO: 4037 - DNA, 23 bp, synthetic construct
  misc_feature 1..23: note = Synthetic Polynucleotide
  source 1..23: mol_type = other DNA
tgagygcacatctttttcctagg

SEQ ID NO: 4038 - DNA, 23 bp, synthetic construct
  misc_feature 1..23: note = Synthetic Polynucleotide
  source 1..23: mol_type = other DNA
gctgcaytgtagttgtggtgagg

SEQ ID NO: 4039 - DNA, 23 bp, synthetic construct
  misc_feature 1..23: note = Synthetic Polynucleotide
  source 1..23: mol_type = other DNA
cgtgcgcygtcccagtttgaagg

SEQ ID NO: 4040 - DNA, 23 bp, synthetic construct
  misc_feature 1..23: note = Synthetic Polynucleotide
  source 1..23: mol_type = other DNA
atgcggtyccagcctctgctggg

SEQ ID NO: 4041 - DNA, 23 bp, synthetic construct
  misc_feature 1..23: note = Synthetic Polynucleotide
  source 1..23: mol_type = other DNA
tagccatygattgctggagaagg

SEQ ID NO: 4042 - DNA, 23 bp, synthetic construct
  misc_feature 1..23: note = Synthetic Polynucleotide
  source 1..23: mol_type = other DNA
tcayattcagctcctatagcagg

SEQ ID NO: 4043 - DNA, 23 bp, synthetic construct
  misc_feature 1..23: note = Synthetic Polynucleotide
  source 1..23: mol_type = other DNA
tgagcagyaaggaaagttattgg

SEQ ID NO: 4044 - DNA, 23 bp, synthetic construct
  misc_feature 1..23: note = Synthetic Polynucleotide
  source 1..23: mol_type = other DNA
acagtgyctgcacccagcgcagg

SEQ ID NO: 4045 - DNA, 23 bp, synthetic construct
  misc_feature 1..23: note = Synthetic Polynucleotide
  source 1..23: mol_type = other DNA
atgytggaggcttggaactctgg

SEQ ID NO: 4046 - DNA, 23 bp, synthetic construct
  misc_feature 1..23: note = Synthetic Polynucleotide
  source 1..23: mol_type = other DNA
gagycacatcttggggaagctgg

SEQ ID NO: 4047 - DNA, 23 bp, synthetic construct
  misc_feature 1..23: note = Synthetic Polynucleotide
  source 1..23: mol_type = other DNA
caaygatgagcttgaagatgagg

SEQ ID NO: 4048 - DNA, 23 bp, synthetic construct
  misc_feature 1..23: note = Synthetic Polynucleotide
  source 1..23: mol_type = other DNA
tagcatayttgcaacaagcttgg

SEQ ID NO: 4049 - DNA, 23 bp, synthetic construct
  misc_feature 1..23: note = Synthetic Polynucleotide
  source 1..23: mol_type = other DNA
aatcctgyacagcaggacttggg

SEQ ID NO: 4050 - DNA, 23 bp, synthetic construct
  misc_feature 1..23: note = Synthetic Polynucleotide
  source 1..23: mol_type = other DNA
accaccgyagcaggcattggtgg

SEQ ID NO: 4051 - DNA, 23 bp, synthetic construct
  misc_feature 1..23: note = Synthetic Polynucleotide
  source 1..23: mol_type = other DNA
gcatccyttccagtgtactccgg

SEQ ID NO: 4052 - DNA, 23 bp, synthetic construct
  misc_feature 1..23: note = Synthetic Polynucleotide
  source 1..23: mol_type = other DNA
cctcayatccaggcaagaattgg

SEQ ID NO: 4053 - DNA, 23 bp, synthetic construct
  misc_feature 1..23: note = Synthetic Polynucleotide
  source 1..23: mol_type = other DNA
ttgytaataaaagttagaaacgg

SEQ ID NO: 4054 - DNA, 23 bp, synthetic construct
  misc_feature 1..23: note = Synthetic Polynucleotide
  source 1..23: mol_type = other DNA
ggttayggtgccgttaagtttgg

SEQ ID NO: 4055 - DNA, 23 bp, synthetic construct
  misc_feature 1..23: note = Synthetic Polynucleotide
  source 1..23: mol_type = other DNA
tggccyaccagatcatgccttgg

SEQ ID NO: 4056 - DNA, 23 bp, synthetic construct
  misc_feature 1..23: note = Synthetic Polynucleotide
  source 1..23: mol_type = other DNA
ccatayaccagcccaggtacagg

SEQ ID NO: 4057 - DNA, 23 bp, synthetic construct
  misc_feature 1..23: note = Synthetic Polynucleotide
  source 1..23: mol_type = other DNA
cgagacaytggcaacagggaagg

SEQ ID NO: 4058 - DNA, 23 bp, synthetic construct
  misc_feature 1..23: note = Synthetic Polynucleotide
  source 1..23: mol_type = other DNA
cttcycatactccttgatggtgg

SEQ ID NO: 4059 - DNA, 23 bp, synthetic construct
  misc_feature 1..23: note = Synthetic Polynucleotide
  source 1..23: mol_type = other DNA
gctcttcycatactccttgatgg

SEQ ID NO: 4060 - DNA, 23 bp, synthetic construct
  misc_feature 1..23: note = Synthetic Polynucleotide
  source 1..23: mol_type = other DNA
ggatcayccgcagaatctgcagg

SEQ ID NO: 4061 - DNA, 23 bp, synthetic construct
  misc_feature 1..23: note = Synthetic Polynucleotide
  source 1..23: mol_type = other DNA
atayctctaattacatcaggtgg

SEQ ID NO: 4062 - DNA, 23 bp, synthetic construct
  misc_feature 1..23: note = Synthetic Polynucleotide
  source 1..23: mol_type = other DNA
agaatayctctaattacatcagg

SEQ ID NO: 4063 - DNA, 23 bp, synthetic construct
  misc_feature 1..23: note = Synthetic Polynucleotide
  source 1..23: mol_type = other DNA
accygtgaagggaacagagatgg

SEQ ID NO: 4064 - DNA, 23 bp, synthetic construct
  misc_feature 1..23: note = Synthetic Polynucleotide
  source 1..23: mol_type = other DNA
tctttaytgtttaagccaacagg

SEQ ID NO: 4065 - DNA, 23 bp, synthetic construct
  misc_feature 1..23: note = Synthetic Polynucleotide
  source 1..23: mol_type = other DNA
atayactctcctccatcttctgg

SEQ ID NO: 4066 - DNA, 23 bp, synthetic construct
  misc_feature 1..23: note = Synthetic Polynucleotide
  source 1..23: mol_type = other DNA
ttctcayagaaggcgatgacggg

SEQ ID NO: 4067 - DNA, 23 bp, synthetic construct
  misc_feature 1..23: note = Synthetic Polynucleotide
  source 1..23: mol_type = other DNA
tttctcayagaaggcgatgacgg

SEQ ID NO: 4068 - DNA, 23 bp, synthetic construct
  misc_feature 1..23: note = Synthetic Polynucleotide
  source 1..23: mol_type = other DNA
tcccayacctgttccccagaagg

SEQ ID NO: 4069 - DNA, 23 bp, synthetic construct
  misc_feature 1..23: note = Synthetic Polynucleotide
  source 1..23: mol_type = other DNA
cagcyagaagacacagggagggg

SEQ ID NO: 4070 - DNA, 23 bp, synthetic construct
  misc_feature 1..23: note = Synthetic Polynucleotide
  source 1..23: mol_type = other DNA
acagcyagaagacacagggaggg

SEQ ID NO: 4071 - DNA, 23 bp, synthetic construct
  misc_feature 1..23: note = Synthetic Polynucleotide
  source 1..23: mol_type = other DNA
cacagcyagaagacacagggagg

SEQ ID NO: 4072 - DNA, 23 bp, synthetic construct
  misc_feature 1..23: note = Synthetic Polynucleotide
  source 1..23: mol_type = other DNA
ctcttaycttgggaaaggagagg

SEQ ID NO: 4073 - DNA, 23 bp, synthetic construct
  misc_feature 1..23: note = Synthetic Polynucleotide
  source 1..23: mol_type = other DNA
tgcagyagccgcccttctgccgg

SEQ ID NO: 4074 - DNA, 23 bp, synthetic construct
  misc_feature 1..23: note = Synthetic Polynucleotide
  source 1..23: mol_type = other DNA
cgcyttgaaaaaaaaagaaaggg

SEQ ID NO: 4075 - DNA, 23 bp, synthetic construct
  misc_feature 1..23: note = Synthetic Polynucleotide
  source 1..23: mol_type = other DNA
tcgcyttgaaaaaaaaagaaagg

SEQ ID NO: 4076 - DNA, 23 bp, synthetic construct
  misc_feature 1..23: note = Synthetic Polynucleotide
  source 1..23: mol_type = other DNA
ccayatcaggggcctgatactgg

SEQ ID NO: 4077 - DNA, 23 bp, synthetic construct
  misc_feature 1..23: note = Synthetic Polynucleotide
  source 1..23: mol_type = other DNA
ccccygggaagggaagaaagggg

SEQ ID NO: 4078 - DNA, 23 bp, synthetic construct
  misc_feature 1..23: note = Synthetic Polynucleotide
  source 1..23: mol_type = other DNA
gccccygggaagggaagaaaggg

SEQ ID NO: 4079 - DNA, 23 bp, synthetic construct
  misc_feature 1..23: note = Synthetic Polynucleotide
  source 1..23: mol_type = other DNA
agccccygggaagggaagaaagg

SEQ ID NO: 4080 - DNA, 23 bp, synthetic construct
  misc_feature 1..23: note = Synthetic Polynucleotide
  source 1..23: mol_type = other DNA
tcaaatcycaccctctggccagg

SEQ ID NO: 4081 - DNA, 23 bp, synthetic construct
  misc_feature 1..23: note = Synthetic Polynucleotide
  source 1..23: mol_type = other DNA
cttgycatcatcatcaaaggggg

SEQ ID NO: 4082 - DNA, 23 bp, synthetic construct
  misc_feature 1..23: note = Synthetic Polynucleotide
  source 1..23: mol_type = other DNA
tcttgycatcatcatcaaagggg

SEQ ID NO: 4083 - DNA, 23 bp, synthetic construct
  misc_feature 1..23: note = Synthetic Polynucleotide
  source 1..23: mol_type = other DNA
atcttgycatcatcatcaaaggg

SEQ ID NO: 4084 - DNA, 23 bp, synthetic construct
  misc_feature 1..23: note = Synthetic Polynucleotide
  source 1..23: mol_type = other DNA
gatcttgycatcatcatcaaagg

SEQ ID NO: 4085 - DNA, 23 bp, synthetic construct
  misc_feature 1..23: note = Synthetic Polynucleotide
  source 1..23: mol_type = other DNA
ccaccyggttttctcttgattgg

SEQ ID NO: 4086 - DNA, 23 bp, synthetic construct
  misc_feature 1..23: note = Synthetic Polynucleotide
  source 1..23: mol_type = other DNA
tgtycttcagtggctgagctggg

SEQ ID NO: 4087 - DNA, 23 bp, synthetic construct
  misc_feature 1..23: note = Synthetic Polynucleotide
  source 1..23: mol_type = other DNA
ctgtycttcagtggctgagctgg

SEQ ID NO: 4088 - DNA, 23 bp, synthetic construct
  misc_feature 1..23: note = Synthetic Polynucleotide
  source 1..23: mol_type = other DNA
gattayatctgtagccttcgggg

SEQ ID NO: 4089 - DNA, 23 bp, synthetic construct
  misc_feature 1..23: note = Synthetic Polynucleotide
  source 1..23: mol_type = other DNA
agattayatctgtagccttcggg

SEQ ID NO: 4090 - DNA, 23 bp, synthetic construct
  misc_feature 1..23: note = Synthetic Polynucleotide
  source 1..23: mol_type = other DNA
gagattayatctgtagccttcgg

SEQ ID NO: 4091 - DNA, 23 bp, synthetic construct
  misc_feature 1..23: note = Synthetic Polynucleotide
  source 1..23: mol_type = other DNA
ttcagygtattgctttgaggagg

SEQ ID NO: 4092 - DNA, 23 bp, synthetic construct
  misc_feature 1..23: note = Synthetic Polynucleotide
  source 1..23: mol_type = other DNA
attcaagyagattacctgattgg

SEQ ID NO: 4093 - DNA, 23 bp, synthetic construct
  misc_feature 1..23: note = Synthetic Polynucleotide
  source 1..23: mol_type = other DNA
tccgcaytgcaagaggcctgggg

SEQ ID NO: 4094 - DNA, 23 bp, synthetic construct
  misc_feature 1..23: note = Synthetic Polynucleotide
  source 1..23: mol_type = other DNA
ttccgcaytgcaagaggcctggg

SEQ ID NO: 4095 - DNA, 23 bp, synthetic construct
  misc_feature 1..23: note = Synthetic Polynucleotide
  source 1..23: mol_type = other DNA
tgccacayactctggcttcaggg

SEQ ID NO: 4096 - DNA, 23 bp, synthetic construct
  misc_feature 1..23: note = Synthetic Polynucleotide
  source 1..23: mol_type = other DNA
gtayagaggtattgttcttttgg

SEQ ID NO: 4097 - DNA, 23 bp, synthetic construct
  misc_feature 1..23: note = Synthetic Polynucleotide
  source 1..23: mol_type = other DNA
ggataacytgtactgttgtaggg

SEQ ID NO: 4098 - DNA, 23 bp, synthetic construct
  misc_feature 1..23: note = Synthetic Polynucleotide
  source 1..23: mol_type = other DNA
accytgacctcctgccagtaggg

SEQ ID NO: 4099 - DNA, 23 bp, synthetic construct
  misc_feature 1..23: note = Synthetic Polynucleotide
  source 1..23: mol_type = other DNA
taccytgacctcctgccagtagg

SEQ ID NO: 4100 - DNA, 23 bp, synthetic construct
  misc_feature 1..23: note = Synthetic Polynucleotide
  source 1..23: mol_type = other DNA
agggaytgcctacaaacaccagg

SEQ ID NO: 4101 - DNA, 23 bp, synthetic construct
  misc_feature 1..23: note = Synthetic Polynucleotide
  source 1..23: mol_type = other DNA
gaagtaayaggtgaccccagggg

SEQ ID NO: 4102 - DNA, 23 bp, synthetic construct
  misc_feature 1..23: note = Synthetic Polynucleotide
  source 1..23: mol_type = other DNA
gcaggyagagatgaccgctgtgg

SEQ ID NO: 4103 - DNA, 23 bp, synthetic construct
  misc_feature 1..23: note = Synthetic Polynucleotide
  source 1..23: mol_type = other DNA
tagccaytgattgctggagaagg

SEQ ID NO: 4104 - DNA, 23 bp, synthetic construct
  misc_feature 1..23: note = Synthetic Polynucleotide
  source 1..23: mol_type = other DNA
gacaygaagggagatgctgaggg

SEQ ID NO: 4105 - DNA, 23 bp, synthetic construct
  misc_feature 1..23: note = Synthetic Polynucleotide
  source 1..23: mol_type = other DNA
agacaygaagggagatgctgagg

SEQ ID NO: 4106 - DNA, 23 bp, synthetic construct
  misc_feature 1..23: note = Synthetic Polynucleotide
  source 1..23: mol_type = other DNA
cagyacaacactgctgctgtggg

SEQ ID NO: 4107 - DNA, 23 bp, synthetic construct
  misc_feature 1..23: note = Synthetic Polynucleotide
  source 1..23: mol_type = other DNA
gcagyacaacactgctgctgtgg

SEQ ID NO: 4108 - DNA, 23 bp, synthetic construct
  misc_feature 1..23: note = Synthetic Polynucleotide
  source 1..23: mol_type = other DNA
gcccayggcggcggcggcggcgg

SEQ ID NO: 4109 - DNA, 23 bp, synthetic construct
  misc_feature 1..23: note = Synthetic Polynucleotide
  source 1..23: mol_type = other DNA
acttayagcttcttgtctccagg

SEQ ID NO: 4110 - DNA, 23 bp, synthetic construct
  misc_feature 1..23: note = Synthetic Polynucleotide
  source 1..23: mol_type = other DNA
cctcactygtggaaagaaacggg

SEQ ID NO: 4111 - DNA, 23 bp, synthetic construct
  misc_feature 1..23: note = Synthetic Polynucleotide
  source 1..23: mol_type = other DNA
tcacayctttctcctcatcatgg

SEQ ID NO: 4112 - DNA, 23 bp, synthetic construct
  misc_feature 1..23: note = Synthetic Polynucleotide
  source 1..23: mol_type = other DNA
cgctyggcgaagaaatctgcggg

SEQ ID NO: 4113 - DNA, 23 bp, synthetic construct
  misc_feature 1..23: note = Synthetic Polynucleotide
  source 1..23: mol_type = other DNA
gcgctyggcgaagaaatctgcgg

SEQ ID NO: 4114 - DNA, 23 bp, synthetic construct
  misc_feature 1..23: note = Synthetic Polynucleotide
  source 1..23: mol_type = other DNA
tccygtcaaaggaaaaacagagg

SEQ ID NO: 4115 - DNA, 23 bp, synthetic construct
  misc_feature 1..23: note = Synthetic Polynucleotide
  source 1..23: mol_type = other DNA
tgtytctctgcaaaggggccagg

SEQ ID NO: 4116 - DNA, 23 bp, synthetic construct
  misc_feature 1..23: note = Synthetic Polynucleotide
  source 1..23: mol_type = other DNA
gcayggtctctcgggcgctgggg

SEQ ID NO: 4117 - DNA, 23 bp, synthetic construct
  misc_feature 1..23: note = Synthetic Polynucleotide
  source 1..23: mol_type = other DNA
tgcayggtctctcgggcgctggg

SEQ ID NO: 4118 - DNA, 23 bp, synthetic construct
  misc_feature 1..23: note = Synthetic Polynucleotide
  source 1..23: mol_type = other DNA
ctgcayggtctctcgggcgctgg

SEQ ID NO: 4119 - DNA, 23 bp, synthetic construct
  misc_feature 1..23: note = Synthetic Polynucleotide
  source 1..23: mol_type = other DNA
tgtcayagtccaagctctgcagg

SEQ ID NO: 4120 - DNA, 22 bp, synthetic construct
  misc_feature 1..22: note = Synthetic Polynucleotide
  source 1..22: mol_type = other DNA
aatctagtaaataaattgatgt

SEQ ID NO: 4121 - DNA, 20 bp, synthetic construct
  misc_feature 1..20: note = Synthetic Polynucleotide
  source 1..20: mol_type = other DNA
gaccaacggctaagtgaaga

SEQ ID NO: 4122 - DNA, 20 bp, synthetic construct
  misc_feature 1..20: note = Synthetic Polynucleotide
  source 1..20: mol_type = other DNA
tcctttcttcacggttgcct

SEQ ID NO: 4123 - DNA, 20 bp, synthetic construct
  misc_feature 1..20: note = Synthetic Polynucleotide
  source 1..20: mol_type = other DNA
ctcctgctcagtgatttcag

SEQ ID NO: 4124 - DNA, 20 bp, synthetic construct
  misc_feature 1..20: note = Synthetic Polynucleotide
  source 1..20: mol_type = other DNA
tgtcacacatgtagttgtag

SEQ ID NO: 4125 - DNA, 20 bp, synthetic construct
  misc_feature 1..20: note = Synthetic Polynucleotide
  source 1..20: mol_type = other DNA
cctcccggccggcggtatcc

SEQ ID NO: 4126 - DNA, 23 bp, synthetic construct
  misc_feature 1..23: note = Synthetic Polynucleotide
  source 1..23: mol_type = other DNA
ggcagccgatacccggggcaggg

SEQ ID NO: 4127 - DNA, 23 bp, synthetic construct
  misc_feature 1..23: note = Synthetic Polynucleotide
  source 1..23: mol_type = other DNA
gggcagccgatacccggggcagg

SEQ ID NO: 4128 - DNA, 23 bp, synthetic construct
  misc_feature 1..23: note = Synthetic Polynucleotide
  source 1..23: mol_type = other DNA
ttattgtccgaaataaaagaaga

SEQ ID NO: 4129 - DNA, 23 bp, synthetic construct
  misc_feature 1..23: note = Synthetic Polynucleotide
  source 1..23: mol_type = other DNA
attgtccgaaataaaagaagagg

SEQ ID NO: 4130 - DNA, 23 bp, synthetic construct
  misc_feature 1..23: note = Synthetic Polynucleotide
  source 1..23: mol_type = other DNA
ttgtccgaaataaaagaagagga

SEQ ID NO: 4131 - DNA, 27 bp, synthetic construct
  misc_feature 1..27: note = Synthetic Polynucleotide
  source 1..27: mol_type = other DNA
gtccgaaataaaagaagaggaaaaaat

SEQ ID NO: 4132 - DNA, 27 bp, synthetic construct
  misc_feature 1..27: note = Synthetic Polynucleotide
  source 1..27: mol_type = other DNA
gtccgaaataaaagaagaggaaaaatt

SEQ ID NO: 4133 - DNA, 23 bp, synthetic construct
  misc_feature 1..23: note = Synthetic Polynucleotide
  source 1..23: mol_type = other DNA
caggaagcacgaggccactgagg

SEQ ID NO: 4134 - DNA, 23 bp, synthetic construct
  misc_feature 1..23: note = Synthetic Polynucleotide
  source 1..23: mol_type = other DNA
aacaggaagcacgaggccactga

SEQ ID NO: 4135 - DNA, 23 bp, synthetic construct
  misc_feature 1..23: note = Synthetic Polynucleotide
  source 1..23: mol_type = other DNA
aggaagcacgaggccactgagga

SEQ ID NO: 4136 - DNA, 23 bp, synthetic construct
  misc_feature 1..23: note = Synthetic Polynucleotide
  source 1..23: mol_type = other DNA
ttggattctggaatccattctgg

SEQ ID NO: 4137 - DNA, 23 bp, synthetic construct
  misc_feature 1..23: note = Synthetic Polynucleotide
  source 1..23: mol_type = other DNA
tctgcatccatcttcacttcaga

SEQ ID NO: 4138 - DNA, 23 bp, synthetic construct
  misc_feature 1..23: note = Synthetic Polynucleotide
  source 1..23: mol_type = other DNA
cttacagccagtaatgtcaccga

SEQ ID NO: 4139 - DNA, 28 bp, synthetic construct
  misc_feature 1..28: note = Synthetic Polynucleotide
  source 1..28: mol_type = other DNA
tgccatcacgtgctcaatcggggcccca

SEQ ID NO: 4140 - DNA, 29 bp, synthetic construct
  misc_feature 1..29: note = Synthetic Polynucleotide
  source 1..29: mol_type = other DNA
cgccccgcagtctatgctttgtgttccag

SEQ ID NO: 4141 - DNA, 23 bp, synthetic construct
  misc_feature 1..23: note = Synthetic Polynucleotide
  source 1..23: mol_type = other DNA
cccgcagtctatgctttgtgttc

SEQ ID NO: 4142 - DNA, 15 bp, synthetic construct
  misc_feature 1..15: note = Synthetic Polynucleotide
  source 1..15: mol_type = other DNA
gggaatgagtcaggc

SEQ ID NO: 4143 - DNA, 32 bp, synthetic construct
  misc_feature 1..32: note = Synthetic Polynucleotide
  source 1..32: mol_type = other DNA
atctggtcgctggggaatgagagtggccacgg

SEQ ID NO: 4144 - protein, 11 aa, synthetic construct
  REGION 1..11: note = Synthetic Polypeptide
IWSLGNESGHG

SEQ ID NO: 4145 - DNA, 46 bp, synthetic construct
  misc_feature 1..46: note = Synthetic Polynucleotide
  source 1..46: mol_type = other DNA
atcatctggtcgctggggaatgggagtggccacggcgctaatcacg

SEQ ID NO: 4146 - protein, 15 aa, synthetic construct
  REGION 1..15: note = Synthetic Polypeptide
IIWSLGNGSGHGANH

SEQ ID NO: 4147 - DNA, 85 bp, synthetic construct
  misc_feature 1..85: note = Synthetic Polynucleotide
  source 1..85: mol_type = other DNA
tcataagcattctgccgacatggaagccgtcgcatacggtgtggtgcacctggatggccagcggcatcagcaccttgtcgccttg

SEQ ID NO: 4148 - DNA, 20 bp, synthetic construct
  misc_feature 1..20: note = Synthetic Polynucleotide
  source 1..20: mol_type = other DNA
nmrgvhgdcvthhvamvkdg

SEQ ID NO: 4149 - DNA, 86 bp, synthetic construct
  misc_feature 1..86: note = Synthetic Polynucleotide
  source 1..86: mol_type = other DNA
tcattaagcattctgccgacatggaagccgtcgcatacggcgcggtgcacctggatggccagcggcatcagcaccttgtcgccttg

SEQ ID NO: 4150 - DNA, 20 bp, synthetic construct
  misc_feature 1..20: note = Synthetic Polynucleotide
  source 1..20: mol_type = other DNA
nmrgvhgdcvarhvamvkdg

SEQ ID NO: 4151 - DNA, 59 bp, synthetic construct
  misc_feature 1..59: note = Synthetic Polynucleotide
  source 1..59: mol_type = other DNA
ccgtcgcatacggtgtggtgcacctggatggccagcggcatcagcaccttgtcgccttg

SEQ ID NO: 4152-4271 - skipped (120 entries)

SEQ ID NO: 4272 - DNA, 27 bp, synthetic construct
  misc_feature 1..27: note = Synthetic Polynucleotide
  source 1..27: mol_type = other DNA
nnnntctctctctctctctctctcngg

SEQ ID NO: 4273 - protein, 1052 aa, synthetic construct
  REGION 1..1052: note = Synthetic Polypeptide
KRNYILGLDIGITSVGYGIIDYETRDVIDAGVRLFKEANVENNEGRRSKRGARRLKRRRRHRIQRVKKLLFDYNLLTDHSELSGINPYEARVKGLSQKLSEEEFSAALLHLAKRRGVHNVNEVEEDTGNELSTKEQISRNSKALEEKYVAELQLERLKKDGEVRGSINRFKTSDYVKEAKQLLKVQKAYHQLDQSFIDTYIDLLETRRTYYEGPGEGSPFGWKDIKEWYEMLMGHCTYFPEELRSVKYAYNADLYNALNDLNNLVITRDENEKLEYYEKFQIIENVFKQKKKPTLKQIAKEILVNEEDIKGYRVTSTGKPEFTNLKVYHDIKDITARKEIIENAELLDQIAKILTIYQSSEDIQEELTNLNSELTQEEIEQISNLKGYTGTHNLSLKAINLILDELWHTNDNQIAIFNRLKLVPKKVDLSQQKEIPTTLVDDFILSPVVKRSFIQSIKVINAIIKKYGLPNDIIIELAREKNSKDAQKMINEMQKRNRQTNERIEEIIRTTGKENAKYLIEKIKLHDMQEGKCLYSLEAIPLEDLLNNPFNYEVDHIIPRSVSFDNSFNNKVLVKQEENSKKGNRTPFQYLSSSDSKISYETFKKHILNLAKGKGRISKTKKEYLLEERDINRFSVQKDFINRNLVDTRYATRGLMNLLRSYFRVNNLDVKVKSINGGFTSFLRRKWKFKKERNKGYKHHAEDALIIANADFIFKEWKKLDKAKKVMENQMFEEKQAESMPEIETEQEYKEIFITPHQIKHIKDFKDYKYSHRVDKKPNRELINDTLYSTRKDDKGNTLIVNNLNGLYDKDNDKLKKLINKSPEKLLMYHHDPQTYQKLKLIMEQYGDEKNPLYKYYEETGNYLTKYSKKDNGPVIKKIKYYGNKLNAHLDITDDYPNSRNKVVKLSLKPYRFDVYLDNGVYKFVTVKNLDVIKKENYYEVNSKCYEEAKKLKKISNQAEFIASFYNNDLIKINGELYRVIGVNNDLLNRIEVNMIDITYREYLENMNDKRPPRIIKTIASKTQSIKKYSTDILGNLYEVKSKKHPQIIKKG

SEQ ID NO: 4274 - protein, 1052 aa, synthetic construct
  REGION 1..1052: note = Synthetic Polypeptide
KRNYILGLDIGITSVGYGIIDYETRDVIDAGVRLFKEANVENNEGRRSKRGARRLKRRRRHRIQRVKKLLFDYNLLTDHSELSGINPYEARVKGLSQKLSEEEFSAALLHLAKRRGVHNVNEVEEDTGNELSTKEQISRNSKALEEKYVAELQLERLKKDGEVRGSINRFKTSDYVKEAKQLLKVQKAYHQLDQSFIDTYIDLLETRRTYYEGPGEGSPFGWKDIKEWYEMLMGHCTYFPEELRSVKYAYNADLYNALNDLNNLVITRDENEKLEYYEKFQIIENVFKQKKKPTLKQIAKEILVNEEDIKGYRVTSTGKPEFTNLKVYHDIKDITARKEIIENAELLDQIAKILTIYQSSEDIQEELTNLNSELTQEEIEQISNLKGYTGTHNLSLKAINLILDELWHTNDNQIAIFNRLKLVPKKVDLSQQKEIPTTLVDDFILSPVVKRSFIQSIKVINAIIKKYGLPNDIIIELAREKNSKDAQKMINEMQKRNRQTNERIEEIIRTTGKENAKYLIEKIKLHDMQEGKCLYSLEAIPLEDLLNNPFNYEVDHIIPRSVSFDNSFNNKVLVKQEEASKKGNRTPFQYLSSSDSKISYETFKKHILNLAKGKGRISKTKKEYLLEERDINRFSVQKDFINRNLVDTRYATRGLMNLLRSYFRVNNLDVKVKSINGGFTSFLRRKWKFKKERNKGYKHHAEDALIIANADFIFKEWKKLDKAKKVMENQMFEEKQAESMPEIETEQEYKEIFITPHQIKHIKDFKDYKYSHRVDKKPNRELINDTLYSTRKDDKGNTLIVNNLNGLYDKDNDKLKKLINKSPEKLLMYHHDPQTYQKLKLIMEQYGDEKNPLYKYYEETGNYLTKYSKKDNGPVIKKIKYYGNKLNAHLDITDDYPNSRNKVVKLSLKPYRFDVYLDNGVYKFVTVKNLDVIKKENYYEVNSKCYEEAKKLKKISNQAEFIASFYNNDLIKINGELYRVIGVNNDLLNRIEVNMIDITYREYLENMNDKRPPRIIKTIASKTQSIKKYSTDILGNLYEVKSKKHPQIIKKG

SEQ ID NO: 4275 - protein, 1052 aa, synthetic construct
  REGION 1..1052: note = Synthetic Polypeptide
KRNYILGLDIGITSVGYGIIDYETRDVIDAGVRLFKEANVENNEGRRSKRGARRLKRRRRHRIQRVKKLLFDYNLLTDHSELSGINPYEARVKGLSQKLSEEEFSAALLHLAKRRGVHNVNEVEEDTGNELSTKEQISRNSKALEEKYVAELQLERLKKDGEVRGSINRFKTSDYVKEAKQLLKVQKAYHQLDQSFIDTYIDLLETRRTYYEGPGEGSPFGWKDIKEWYEMLMGHCTYFPEELRSVKYAYNADLYNALNDLNNLVITRDENEKLEYYEKFQIIENVFKQKKKPTLKQIAKEILVNEEDIKGYRVTSTGKPEFTNLKVYHDIKDITARKEIIENAELLDQIAKILTIYQSSEDIQEELTNLNSELTQEEIEQISNLKGYTGTHNLSLKAINLILDELWHTNDNQIAIFNRLKLVPKKVDLSQQKEIPTTLVDDFILSPVVKRSFIQSIKVINAIIKKYGLPNDIIIELAREKNSKDAQKMINEMQKRNRQTNERIEEIIRTTGKENAKYLIEKIKLHDMQEGKCLYSLEAIPLEDLLNNPFNYEVDHIIPRSVSFDNSFNNKVLVKQEEASKKGNRTPFQYLSSSDSKISYETFKKHILNLAKGKGRISKTKKEYLLEERDINRFSVQKDFINRNLVDTRYATRGLMNLLRSYFRVNNLDVKVKSINGGFTSFLRRKWKFKKERNKGYKHHAEDALIIANADFIFKEWKKLDKAKKVMENQMFEEKQAESMPEIETEQEYKEIFITPHQIKHIKDFKDYKYSHRVDKKPNRKLINDTLYSTRKDDKGNTLIVNNLNGLYDKDNDKLKKLINKSPEKLLMYHHDPQTYQKLKLIMEQYGDEKNPLYKYYEETGNYLTKYSKKDNGPVIKKIKYYGNKLNAHLDITDDYPNSRNKVVKLSLKPYRFDVYLDNGVYKFVTVKNLDVIKKENYYEVNSKCYEEAKKLKKISNQAEFIASFYKNDLIKINGELYRVIGVNNDLLNRIEVNMIDITYREYLENMNDKRPPHIIKTIASKTQSIKKYSTDILGNLYEVKSKKHPQIIKKG

SEQ ID NO: 4276 - protein, 1367 aa, synthetic construct
  REGION 1..1367: note = Synthetic Polypeptide
DKKYSIGLDIGTNSVGWAVITDEYKVPSKKFKVLGNTDRHSIKKNLIGALLFDSGETAEATRLKRTARRRYTRRKNRICYLQEIFSNEMAKVDDSFFHRLEESFLVEEDKKHERHPIFGNIVDEVAYHEKYPTIYHLRKKLVDSTDKADLRLIYLALAHMIKFRGHFLIEGDLNPDNSDVDKLFIQLVQTYNQLFEENPINASGVDAKAILSARLSKSRRLENLIAQLPGEKKNGLFGNLIALSLGLTPNFKSNFDLAEDAKLQLSKDTYDDDLDNLLAQIGDQYADLFLAAKNLSDAILLSDILRVNTEITKAPLSASMIKRYDEHHQDLTLLKALVRQQLPEKYKEIFFDQSKNGYAGYIDGGASQEEFYKFIKPILEKMDGTEELLVKLNREDLLRKQRTFDNGSIPHQIHLGELHAILRRQEDFYPFLKDNREKIEKILTFRIPYYVGPLARGNSRFAWMTRKSEETITPWNFEEVVDKGASAQSFIERMTNFDKNLPNEKVLPKHSLLYEYFTVYNELTKVKYVTEGMRKPAFLSGEQKKAIVDLLFKTNRKVTVKQLKEDYFKKIECFDSVEISGVEDRFNASLGTYHDLLKIIKDKDFLDNEENEDILEDIVLTLTLFEDREMIEERLKTYAHLFDDKVMKQLKRRRYTGWGRLSRKLINGIRDKQSGKTILDFLKSDGFANRNFMQLIHDDSLTFKEDIQKAQVSGQGDSLHEHIANLAGSPAIKKGILQTVKVVDELVKVMGRHKPENIVIEMARENQTTQKGQKNSRERMKRIEEGIKELGSQILKEHPVENTQLQNEKLYLYYLQNGRDMYVDQELDINRLSDYDVDHIVPQSFLKDDSIDNKVLTRSDKNRGKSDNVPSEEVVKKMKNYWRQLLNAKLITQRKFDNLTKAERGGLSELDKAGFIKRQLVETRQITKHVAQILDSRMNTKYDENDKLIREVKVITLKSKLVSDFRKDFQFYKVREINNYHHAHDAYLNAVVGTALIKKYPKLESEFVYGDYKVYDVRKMIAKSEQEIGKATAKYFFYSNIMNFFKTEITLANGEIRKRPLIETNGETGEIVWDKGRDFATVRKVLSMPQVNIVKKTEVQTGGFSKESILPKRNSDKLIARKKDWDPKKYGGFDSPTVAYSVLVVAKVEKGKSKKLKSVKELLGITIMERSSFEKNPIDFLEAKGYKEVKKDLIIKLPKYSLFELENGRKRMLASAGELQKGNELALPSKYVNFLYLASHYEKLKGSPEDNEQKQLFVEQHKHYLDEIIEQISEFSKRVILADANLDKVLSAYNKHRDKPIREQAENIIHLFTLTNLGAPAAFKYFDTTIDRKRYTSTKEVLDATLIHQSITGLYETRIDLSQLGGD

SEQ ID NO: 4277 - protein, 1367 aa, synthetic construct
  REGION 1..1367: note = Synthetic Polypeptide
DKKYSIGLAIGTNSVGWAVITDEYKVPSKKFKVLGNTDRHSIKKNLIGALLFDSGETAEATRLKRTARRRYTRRKNRICYLQEIFSNEMAKVDDSFFHRLEESFLVEEDKKHERHPIFGNIVDEVAYHEKYPTIYHLRKKLVDSTDKADLRLIYLALAHMIKFRGHFLIEGDLNPDNSDVDKLFIQLVQTYNQLFEENPINASGVDAKAILSARLSKSRRLENLIAQLPGEKKNGLFGNLIALSLGLTPNFKSNFDLAEDAKLQLSKDTYDDDLDNLLAQIGDQYADLFLAAKNLSDAILLSDILRVNTEITKAPLSASMIKRYDEHHQDLTLLKALVRQQLPEKYKEIFFDQSKNGYAGYIDGGASQEEFYKFIKPILEKMDGTEELLVKLNREDLLRKQRTFDNGSIPHQIHLGELHAILRRQEDFYPFLKDNREKIEKILTFRIPYYVGPLARGNSRFAWMTRKSEETITPWNFEEVVDKGASAQSFIERMTNFDKNLPNEKVLPKHSLLYEYFTVYNELTKVKYVTEGMRKPAFLSGEQKKAIVDLLFKTNRKVTVKQLKEDYFKKIECFDSVEISGVEDRFNASLGTYHDLLKIIKDKDFLDNEENEDILEDIVLTLTLFEDREMIEERLKTYAHLFDDKVMKQLKRRRYTGWGRLSRKLINGIRDKQSGKTILDFLKSDGFANRNFMQLIHDDSLTFKEDIQKAQVSGQGDSLHEHIANLAGSPAIKKGILQTVKVVDELVKVMGRHKPENIVIEMARENQTTQKGQKNSRERMKRIEEGIKELGSQILKEHPVENTQLQNEKLYLYYLQNGRDMYVDQELDINRLSDYDVDHIVPQSFLKDDSIDNKVLTRSDKNRGKSDNVPSEEVVKKMKNYWRQLLNAKLITQRKFDNLTKAERGGLSELDKAGFIKRQLVETRQITKHVAQILDSRMNTKYDENDKLIREVKVITLKSKLVSDFRKDFQFYKVREINNYHHAHDAYLNAVVGTALIKKYPKLESEFVYGDYKVYDVRKMIAKSEQEIGKATAKYFFYSNIMNFFKTEITLANGEIRKRPLIETNGETGEIVWDKGRDFATVRKVLSMPQVNIVKKTEVQTGGFSKESILPKRNSDKLIARKKDWDPKKYGGFDSPTVAYSVLVVAKVEKGKSKKLKSVKELLGITIMERSSFEKNPIDFLEAKGYKEVKKDLIIKLPKYSLFELENGRKRMLASAGELQKGNELALPSKYVNFLYLASHYEKLKGSPEDNEQKQLFVEQHKHYLDEIIEQISEFSKRVILADANLDKVLSAYNKHRDKPIREQAENIIHLFTLTNLGAPAAFKYFDTTIDRKRYTSTKEVLDATLIHQSITGLYETRIDLSQLGGD

SEQ ID NO: 4278 - protein, 1367 aa, synthetic construct
  REGION 1..1367: note = Synthetic Polypeptide
DKKYSIGLAIGTNSVGWAVITDEYKVPSKKFKVLGNTDRHSIKKNLIGALLFDSGETAEATRLKRTARRRYTRRKNRICYLQEIFSNEMAKVDDSFFHRLEESFLVEEDKKHERHPIFGNIVDEVAYHEKYPTIYHLRKKLVDSTDKADLRLIYLALAHMIKFRGHFLIEGDLNPDNSDVDKLFIQLVQTYNQLFEENPINASGVDAKAILSARLSKSRRLENLIAQLPGEKKNGLFGNLIALSLGLTPNFKSNFDLAEDAKLQLSKDTYDDDLDNLLAQIGDQYADLFLAAKNLSDAILLSDILRVNTEITKAPLSASMIKRYDEHHQDLTLLKALVRQQLPEKYKEIFFDQSKNGYAGYIDGGASQEEFYKFIKPILEKMDGTEELLVKLNREDLLRKQRTFDNGSIPHQIHLGELHAILRRQEDFYPFLKDNREKIEKILTFRIPYYVGPLARGNSRFAWMTRKSEETITPWNFEEVVDKGASAQSFIERMTNFDKNLPNEKVLPKHSLLYEYFTVYNELTKVKYVTEGMRKPAFLSGEQKKAIVDLLFKTNRKVTVKQLKEDYFKKIECFDSVEISGVEDRFNASLGTYHDLLKIIKDKDFLDNEENEDILEDIVLTLTLFEDREMIEERLKTYAHLFDDKVMKQLKRRRYTGWGRLSRKLINGIRDKQSGKTILDFLKSDGFANRNFMQLIHDDSLTFKEDIQKAQVSGQGDSLHEHIANLAGSPAIKKGILQTVKVVDELVKVMGRHKPENIVIEMARENQTTQKGQKNSRERMKRIEEGIKELGSQILKEHPVENTQLQNEKLYLYYLQNGRDMYVDQELDINRLSDYDVDHIVPQSFLKDDSIDNKVLTRSDKNRGKSDNVPSEEVVKKMKNYWRQLLNAKLITQRKFDNLTKAERGGLSELDKAGFIKRQLVETRQITKHVAQILDSRMNTKYDENDKLIREVKVITLKSKLVSDFRKDFQFYKVREINNYHHAHDAYLNAVVGTALIKKYPKLESEFVYGDYKVYDVRKMIAKSEQEIGKATAKYFFYSNIMNFFKTEITLANGEIRKRPLIETNGETGEIVWDKGRDFATVRKVLSMPQVNIVKKTEVQTGGFSKESILPKRNSDKLIARKKDWDPKKYGGFESPTVAYSVLVVAKVEKGKSKKLKSVKELLGITIMERSSFEKNPIDFLEAKGYKEVKKDLIIKLPKYSLFELENGRKRMLASAGELQKGNELALPSKYVNFLYLASHYEKLKGSPEDNEQKQLFVEQHKHYLDEIIEQISEFSKRVILADANLDKVLSAYNKHRDKPIREQAENIIHLFTLTNLGAPAAFKYFDTTIDRKQYRSTKEVLDATLIHQSITGLYETRIDLSQLGGD

SEQ ID NO: 4279 - protein, 1367 aa, synthetic construct
  REGION 1..1367: note = Synthetic Polypeptide
DKKYSIGLAIGTNSVGWAVITDEYKVPSKKFKVLGNTDRHSIKKNLIGALLFDSGETAEATRLKRTARRRYTRRKNRICYLQEIFSNEMAKVDDSFFHRLEESFLVEEDKKHERHPIFGNIVDEVAYHEKYPTIYHLRKKLVDSTDKADLRLIYLALAHMIKFRGHFLIEGDLNPDNSDVDKLFIQLVQTYNQLFEENPINASGVDAKAILSARLSKSRRLENLIAQLPGEKKNGLFGNLIALSLGLTPNFKSNFDLAEDAKLQLSKDTYDDDLDNLLAQIGDQYADLFLAAKNLSDAILLSDILRVNTEITKAPLSASMIKRYDEHHQDLTLLKALVRQQLPEKYKEIFFDQSKNGYAGYIDGGASQEEFYKFIKPILEKMDGTEELLVKLNREDLLRKQRTFDNGSIPHQIHLGELHAILRRQEDFYPFLKDNREKIEKILTFRIPYYVGPLARGNSRFAWMTRKSEETITPWNFEEVVDKGASAQSFIERMTNFDKNLPNEKVLPKHSLLYEYFTVYNELTKVKYVTEGMRKPAFLSGEQKKAIVDLLFKTNRKVTVKQLKEDYFKKIECFDSVEISGVEDRFNASLGTYHDLLKIIKDKDFLDNEENEDILEDIVLTLTLFEDREMIEERLKTYAHLFDDKVMKQLKRRRYTGWGRLSRKLINGIRDKQSGKTILDFLKSDGFANRNFMQLIHDDSLTFKEDIQKAQVSGQGDSLHEHIANLAGSPAIKKGILQTVKVVDELVKVMGRHKPENIVIEMARENQTTQKGQKNSRERMKRIEEGIKELGSQILKEHPVENTQLQNEKLYLYYLQNGRDMYVDQELDINRLSDYDVDHIVPQSFLKDDSIDNKVLTRSDKNRGKSDNVPSEEVVKKMKNYWRQLLNAKLITQRKFDNLTKAERGGLSELDKAGFIKRQLVETRQITKHVAQILDSRMNTKYDENDKLIREVKVITLKSKLVSDFRKDFQFYKVREINNYHHAHDAYLNAVVGTALIKKYPKLESEFVYGDYKVYDVRKMIAKSEQEIGKATAKYFFYSNIMNFFKTEITLANGEIRKRPLIETNGETGEIVWDKGRDFATVRKVLSMPQVNIVKKTEVQTGGFSKESILPKRNSDKLIARKKDWDPKKYGGFVSPTVAYSVLVVAKVEKGKSKKLKSVKELLGITIMERSSFEKNPIDFLEAKGYKEVKKDLIIKLPKYSLFELENGRKRMLASAGELQKGNELALPSKYVNFLYLASHYEKLKGSPEDNEQKQLFVEQHKHYLDEIIEQISEFSKRVILADANLDKVLSAYNKHRDKPIREQAENIIHLFTLTNLGAPAAFKYFDTTIDRKQYRSTKEVLDATLIHQSITGLYETRIDLSQLGGD

SEQ ID NO: 4280 - protein, 1367 aa, synthetic construct
  REGION 1..1367: note = Synthetic Polypeptide
DKKYSIGLAIGTNSVGWAVITDEYKVPSKKFKVLGNTDRHSIKKNLIGALLFDSGETAEATRLKRTARRRYTRRKNRICYLQEIFSNEMAKVDDSFFHRLEESFLVEEDKKHERHPIFGNIVDEVAYHEKYPTIYHLRKKLVDSTDKADLRLIYLALAHMIKFRGHFLIEGDLNPDNSDVDKLFIQLVQTYNQLFEENPINASGVDAKAILSARLSKSRRLENLIAQLPGEKKNGLFGNLIALSLGLTPNFKSNFDLAEDAKLQLSKDTYDDDLDNLLAQIGDQYADLFLAAKNLSDAILLSDILRVNTEITKAPLSASMIKRYDEHHQDLTLLKALVRQQLPEKYKEIFFDQSKNGYAGYIDGGASQEEFYKFIKPILEKMDGTEELLVKLNREDLLRKQRTFDNGSIPHQIHLGELHAILRRQEDFYPFLKDNREKIEKILTFRIPYYVGPLARGNSRFAWMTRKSEETITPWNFEEVVDKGASAQSFIERMTNFDKNLPNEKVLPKHSLLYEYFTVYNELTKVKYVTEGMRKPAFLSGEQKKAIVDLLFKTNRKVTVKQLKEDYFKKIECFDSVEISGVEDRFNASLGTYHDLLKIIKDKDFLDNEENEDILEDIVLTLTLFEDREMIEERLKTYAHLFDDKVMKQLKRRRYTGWGRLSRKLINGIRDKQSGKTILDFLKSDGFANRNFMQLIHDDSLTFKEDIQKAQVSGQGDSLHEHIANLAGSPAIKKGILQTVKVVDELVKVMGRHKPENIVIEMARENQTTQKGQKNSRERMKRIEEGIKELGSQILKEHPVENTQLQNEKLYLYYLQNGRDMYVDQELDINRLSDYDVDHIVPQSFLKDDSIDNKVLTRSDKNRGKSDNVPSEEVVKKMKNYWRQLLNAKLITQRKFDNLTKAERGGLSELDKAGFIKRQLVETRQITKHVAQILDSRMNTKYDENDKLIREVKVITLKSKLVSDFRKDFQFYKVREINNYHHAHDAYLNAVVGTALIKKYPKLESEFVYGDYKVYDVRKMIAKSEQEIGKATAKYFFYSNIMNFFKTEITLANGEIRKRPLIETNGETGEIVWDKGRDFATVRKVLSMPQVNIVKKTEVQTGGFSKESILPKRNSDKLIARKKDWDPKKYGGFVSPTVAYSVLVVAKVEKGKSKKLKSVKELLGITIMERSSFEKNPIDFLEAKGYKEVKKDLIIKLPKYSLFELENGRKRMLASARELQKGNELALPSKYVNFLYLASHYEKLKGSPEDNEQKQLFVEQHKHYLDEIIEQISEFSKRVILADANLDKVLSAYNKHRDKPIREQAENIIHLFTLTNLGAPAAFKYFDTTIDRKEYRSTKEVLDATLIHQSITGLYETRIDLSQLGGD

SEQ ID NO: 4281 - protein, 1395 aa, synthetic construct
  REGION 1..1395: note = Synthetic Polypeptide
MSSETGPVAVDPTLRRRIEPHEFEVFFDPRELRKETCLLYEINWGGRHSIWRHTSQNTNKHVEVNFIEKFTTERYFCPNTRCSITWFLSWSPCGECSRAITEFLSRYPHVTLFIYIARLYHHADPRNRQGLRDLISSGVTIQIMTEQESGYCWRNFVNYSPSNEAHWPRYPHLWVRLYVLELYCIILGLPPCLNILRRKQPQLTFFTIALQSCHYQRLPPHILWATGLKSGSETPGTSESATPESKRNYILGLDIGITSVGYGIIDYETRDVIDAGVRLFKEANVENNEGRRSKRGARRLKRRRRHRIQRVKKLLFDYNLLTDHSELSGINPYEARVKGLSQKLSEEEFSAALLHLAKRRGVHNVNEVEEDTGNELSTKEQISRNSKALEEKYVAELQLERLKKDGEVRGSINRFKTSDYVKEAKQLLKVQKAYHQLDQSFIDTYIDLLETRRTYYEGPGEGSPFGWKDIKEWYEMLMGHCTYFPEELRSVKYAYNADLYNALNDLNNLVITRDENEKLEYYEKFQIIENVFKQKKKPTLKQIAKEILVNEEDIKGYRVTSTGKPEFTNLKVYHDIKDITARKEIIENAELLDQIAKILTIYQSSEDIQEELTNLNSELTQEEIEQISNLKGYTGTHNLSLKAINLILDELWHTNDNQIAIFNRLKLVPKKVDLSQQKEIPTTLVDDFILSPVVKRSFIQSIKVINAIIKKYGLPNDIIIELAREKNSKDAQKMINEMQKRNRQTNERIEEIIRTTGKENAKYLIEKIKLHDMQEGKCLYSLEAIPLEDLLNNPFNYEVDHIIPRSVSFDNSFNNKVLVKQEEASKKGNRTPFQYLSSSDSKISYETFKKHILNLAKGKGRISKTKKEYLLEERDINRFSVQKDFINRNLVDTRYATRGLMNLLRSYFRVNNLDVKVKSINGGFTSFLRRKWKFKKERNKGYKHHAEDALIIANADFIFKEWKKLDKAKKVMENQMFEEKQAESMPEIETEQEYKEIFITPHQIKHIKDFKDYKYSHRVDKKPNRELINDTLYSTRKDDKGNTLIVNNLNGLYDKDNDKLKKLINKSPEKLLMYHHDPQTYQKLKLIMEQYGDEKNPLYKYYEETGNYLTKYSKKDNGPVIKKIKYYGNKLNAHLDITDDYPNSRNKVVKLSLKPYRFDVYLDNGVYKFVTVKNLDVIKKENYYEVNSKCYEEAKKLKKISNQAEFIASFYNNDLIKINGELYRVIGVNNDLLNRIEVNMIDITYREYLENMNDKRPPRIIKTIASKTQSIKKYSTDILGNLYEVKSKKHPQIIKKGSGGSTNLSDIIEKETGKQLVIQESILMLPEEVEEVIGNKPESDILVHTAYDESTDENVMLLTSDAPEYKPWALVIQDSNGENKIKMLSGGSPKKKRKV

SEQ ID NO: 4282 - protein, 1395 aa, synthetic construct
  REGION 1..1395: note = Synthetic Polypeptide
MSSETGPVAVDPTLRRRIEPHEFEVFFDPRELRKETCLLYEINWGGRHSIWRHTSQNTNKHVEVNFIEKFTTERYFCPNTRCSITWFLSWSPCGECSRAITEFLSRYPHVTLFIYIARLYHHADPRNRQGLRDLISSGVTIQIMTEQESGYCWRNFVNYSPSNEAHWPRYPHLWVRLYVLELYCIILGLPPCLNILRRKQPQLTFFTIALQSCHYQRLPPHILWATGLKSGSETPGTSESATPESKRNYILGLDIGITSVGYGIIDYETRDVIDAGVRLFKEANVENNEGRRSKRGARRLKRRRRHRIQRVKKLLFDYNLLTDHSELSGINPYEARVKGLSQKLSEEEFSAALLHLAKRRGVHNVNEVEEDTGNELSTKEQISRNSKALEEKYVAELQLERLKKDGEVRGSINRFKTSDYVKEAKQLLKVQKAYHQLDQSFIDTYIDLLETRRTYYEGPGEGSPFGWKDIKEWYEMLMGHCTYFPEELRSVKYAYNADLYNALNDLNNLVITRDENEKLEYYEKFQIIENVFKQKKKPTLKQIAKEILVNEEDIKGYRVTSTGKPEFTNLKVYHDIKDITARKEIIENAELLDQIAKILTIYQSSEDIQEELTNLNSELTQEEIEQISNLKGYTGTHNLSLKAINLILDELWHTNDNQIAIFNRLKLVPKKVDLSQQKEIPTTLVDDFILSPVVKRSFIQSIKVINAIIKKYGLPNDIIIELAREKNSKDAQKMINEMQKRNRQTNERIEEIIRTTGKENAKYLIEKIKLHDMQEGKCLYSLEAIPLEDLLNNPFNYEVDHIIPRSVSFDNSFNNKVLVKQEEASKKGNRTPFQYLSSSDSKISYETFKKHILNLAKGKGRISKTKKEYLLEERDINRFSVQKDFINRNLVDTRYATRGLMNLLRSYFRVNNLDVKVKSINGGFTSFLRRKWKFKKERNKGYKHHAEDALIIANADFIFKEWKKLDKAKKVMENQMFEEKQAESMPEIETEQEYKEIFITPHQIKHIKDFKDYKYSHRVDKKPNRKLINDTLYSTRKDDKGNTLIVNNLNGLYDKDNDKLKKLINKSPEKLLMYHHDPQTYQKLKLIMEQYGDEKNPLYKYYEETGNYLTKYSKKDNGPVIKKIKYYGNKLNAHLDITDDYPNSRNKVVKLSLKPYRFDVYLDNGVYKFVTVKNLDVIKKENYYEVNSKCYEEAKKLKKISNQAEFIASFYKNDLIKINGELYRVIGVNNDLLNRIEVNMIDITYREYLENMNDKRPPHIIKTIASKTQSIKKYSTDILGNLYEVKSKKHPQIIKKGSGGSTNLSDIIEKETGKQLVIQESILMLPEEVEEVIGNKPESDILVHTAYDESTDENVMLLTSDAPEYKPWALVIQDSNGENKIKMLSGGSPKKKRKV

SEQ ID NO: 4283 - protein, 1710 aa, synthetic construct
  REGION 1..1710: note = Synthetic Polypeptide
MSSETGPVAVDPTLRRRIEPHEFEVFFDPRELRKETCLLYEINWGGRHSIWRHTSQNTNKHVEVNFIEKFTTERYFCPNTRCSITWFLSWSPCGECSRAITEFLSRYPHVTLFIYIARLYHHADPRNRQGLRDLISSGVTIQIMTEQESGYCWRNFVNYSPSNEAHWPRYPHLWVRLYVLELYCIILGLPPCLNILRRKQPQLTFFTIALQSCHYQRLPPHILWATGLKSGSETPGTSESATPESDKKYSIGLAIGTNSVGWAVITDEYKVPSKKFKVLGNTDRHSIKKNLIGALLFDSGETAEATRLKRTARRRYTRRKNRICYLQEIFSNEMAKVDDSFFHRLEESFLVEEDKKHERHPIFGNIVDEVAYHEKYPTIYHLRKKLVDSTDKADLRLIYLALAHMIKFRGHFLIEGDLNPDNSDVDKLFIQLVQTYNQLFEENPINASGVDAKAILSARLSKSRRLENLIAQLPGEKKNGLFGNLIALSLGLTPNFKSNFDLAEDAKLQLSKDTYDDDLDNLLAQIGDQYADLFLAAKNLSDAILLSDILRVNTEITKAPLSASMIKRYDEHHQDLTLLKALVRQQLPEKYKEIFFDQSKNGYAGYIDGGASQEEFYKFIKPILEKMDGTEELLVKLNREDLLRKQRTFDNGSIPHQIHLGELHAILRRQEDFYPFLKDNREKIEKILTFRIPYYVGPLARGNSRFAWMTRKSEETITPWNFEEVVDKGASAQSFIERMTNFDKNLPNEKVLPKHSLLYEYFTVYNELTKVKYVTEGMRKPAFLSGEQKKAIVDLLFKTNRKVTVKQLKEDYFKKIECFDSVEISGVEDRFNASLGTYHDLLKIIKDKDFLDNEENEDILEDIVLTLTLFEDREMIEERLKTYAHLFDDKVMKQLKRRRYTGWGRLSRKLINGIRDKQSGKTILDFLKSDGFANRNFMQLIHDDSLTFKEDIQKAQVSGQGDSLHEHIANLAGSPAIKKGILQTVKVVDELVKVMGRHKPENIVIEMARENQTTQKGQKNSRERMKRIEEGIKELGSQILKEHPVENTQLQNEKLYLYYLQNGRDMYVDQELDINRLSDYDVDHIVPQSFLKDDSIDNKVLTRSDKNRGKSDNVPSEEVVKKMKNYWRQLLNAKLITQRKFDNLTKAERGGLSELDKAGFIKRQLVETRQITKHVAQILDSRMNTKYDENDKLIREVKVITLKSKLVSDFRKDFQFYKVREINNYHHAHDAYLNAVVGTALIKKYPKLESEFVYGDYKVYDVRKMIAKSEQEIGKATAKYFFYSNIMNFFKTEITLANGEIRKRPLIETNGETGEIVWDKGRDFATVRKVLSMPQVNIVKKTEVQTGGFSKESILPKRNSDKLIARKKDWDPKKYGGFESPTVAYSVLVVAKVEKGKSKKLKSVKELLGITIMERSSFEKNPIDFLEAKGYKEVKKDLIIKLPKYSLFELENGRKRMLASAGELQKGNELALPSKYVNFLYLASHYEKLKGSPEDNEQKQLFVEQHKHYLDEIIEQISEFSKRVILADANLDKVLSAYNKHRDKPIREQAENIIHLFTLTNLGAPAAFKYFDTTIDRKQYRSTKEVLDATLIHQSITGLYETRIDLSQLGGDSGGSTNLSDIIEKETGKQLVIQESILMLPEEVEEVIGNKPESDILVHTAYDESTDENVMLLTSDAPEYKPWALVIQDSNGENKIKMLSGGSPKKKRKV

SEQ ID NO: 4284 - protein, 1710 aa, synthetic construct
  REGION 1..1710: note = Synthetic Polypeptide
MSSETGPVAVDPTLRRRIEPHEFEVFFDPRELRKETCLLYEINWGGRHSIWRHTSQNTNKHVEVNFIEKFTTERYFCPNTRCSITWFLSWSPCGECSRAITEFLSRYPHVTLFIYIARLYHHADPRNRQGLRDLISSGVTIQIMTEQESGYCWRNFVNYSPSNEAHWPRYPHLWVRLYVLELYCIILGLPPCLNILRRKQPQLTFFTIALQSCHYQRLPPHILWATGLKSGSETPGTSESATPESDKKYSIGLAIGTNSVGWAVITDEYKVPSKKFKVLGNTDRHSIKKNLIGALLFDSGETAEATRLKRTARRRYTRRKNRICYLQEIFSNEMAKVDDSFFHRLEESFLVEEDKKHERHPIFGNIVDEVAYHEKYPTIYHLRKKLVDSTDKADLRLIYLALAHMIKFRGHFLIEGDLNPDNSDVDKLFIQLVQTYNQLFEENPINASGVDAKAILSARLSKSRRLENLIAQLPGEKKNGLFGNLIALSLGLTPNFKSNFDLAEDAKLQLSKDTYDDDLDNLLAQIGDQYADLFLAAKNLSDAILLSDILRVNTEITKAPLSASMIKRYDEHHQDLTLLKALVRQQLPEKYKEIFFDQSKNGYAGYIDGGASQEEFYKFIKPILEKMDGTEELLVKLNREDLLRKQRTFDNGSIPHQIHLGELHAILRRQEDFYPFLKDNREKIEKILTFRIPYYVGPLARGNSRFAWMTRKSEETITPWNFEEVVDKGASAQSFIERMTNFDKNLPNEKVLPKHSLLYEYFTVYNELTKVKYVTEGMRKPAFLSGEQKKAIVDLLFKTNRKVTVKQLKEDYFKKIECFDSVEISGVEDRFNASLGTYHDLLKIIKDKDFLDNEENEDILEDIVLTLTLFEDREMIEERLKTYAHLFDDKVMKQLKRRRYTGWGRLSRKLINGIRDKQSGKTILDFLKSDGFANRNFMQLIHDDSLTFKEDIQKAQVSGQGDSLHEHIANLAGSPAIKKGILQTVKVVDELVKVMGRHKPENIVIEMARENQTTQKGQKNSRERMKRIEEGIKELGSQILKEHPVENTQLQNEKLYLYYLQNGRDMYVDQELDINRLSDYDVDHIVPQSFLKDDSIDNKVLTRSDKNRGKSDNVPSEEVVKKMKNYWRQLLNAKLITQRKFDNLTKAERGGLSELDKAGFIKRQLVETRQITKHVAQILDSRMNTKYDENDKLIREVKVITLKSKLVSDFRKDFQFYKVREINNYHHAHDAYLNAVVGTALIKKYPKLESEFVYGDYKVYDVRKMIAKSEQEIGKATAKYFFYSNIMNFFKTEITLANGEIRKRPLIETNGETGEIVWDKGRDFATVRKVLSMPQVNIVKKTEVQTGGFSKESILPKRNSDKLIARKKDWDPKKYGGFVSPTVAYSVLVVAKVEKGKSKKLKSVKELLGITIMERSSFEKNPIDFLEAKGYKEVKKDLIIKLPKYSLFELENGRKRMLASAGELQKGNELALPSKYVNFLYLASHYEKLKGSPEDNEQKQLFVEQHKHYLDEIIEQISEFSKRVILADANLDKVLSAYNKHRDKPIREQAENIIHLFTLTNLGAPAAFKYFDTTIDRKQYRSTKEVLDATLIHQSITGLYETRIDLSQLGGDSGGSTNLSDIIEKETGKQLVIQESILMLPEEVEEVIGNKPESDILVHTAYDESTDENVMLLTSDAPEYKPWALVIQDSNGENKIKMLSGGSPKKKRKV

SEQ ID NO: 4285 - protein, 1710 aa, synthetic construct
  REGION 1..1710: note = Synthetic Polypeptide
MSSETGPVAVDPTLRRRIEPHEFEVFFDPRELRKETCLLYEINWGGRHSIWRHTSQNTNKHVEVNFIEKFTTERYFCPNTRCSITWFLSWSPCGECSRAITEFLSRYPHVTLFIYIARLYHHADPRNRQGLRDLISSGVTIQIMTEQESGYCWRNFVNYSPSNEAHWPRYPHLWVRLYVLELYCIILGLPPCLNILRRKQPQLTFFTIALQSCHYQRLPPHILWATGLKSGSETPGTSESATPESDKKYSIGLAIGTNSVGWAVITDEYKVPSKKFKVLGNTDRHSIKKNLIGALLFDSGETAEATRLKRTARRRYTRRKNRICYLQEIFSNEMAKVDDSFFHRLEESFLVEEDKKHERHPIFGNIVDEVAYHEKYPTIYHLRKKLVDSTDKADLRLIYLALAHMIKFRGHFLIEGDLNPDNSDVDKLFIQLVQTYNQLFEENPINASGVDAKAILSARLSKSRRLENLIAQLPGEKKNGLFGNLIALSLGLTPNFKSNFDLAEDAKLQLSKDTYDDDLDNLLAQIGDQYADLFLAAKNLSDAILLSDILRVNTEITKAPLSASMIKRYDEHHQDLTLLKALVRQQLPEKYKEIFFDQSKNGYAGYIDGGASQEEFYKFIKPILEKMDGTEELLVKLNREDLLRKQRTFDNGSIPHQIHLGELHAILRRQEDFYPFLKDNREKIEKILTFRIPYYVGPLARGNSRFAWMTRKSEETITPWNFEEVVDKGASAQSFIERMTNFDKNLPNEKVLPKHSLLYEYFTVYNELTKVKYVTEGMRKPAFLSGEQKKAIVDLLFKTNRKVTVKQLKEDYFKKIECFDSVEISGVEDRFNASLGTYHDLLKIIKDKDFLDNEENEDILEDIVLTLTLFEDREMIEERLKTYAHLFDDKVMKQLKRRRYTGWGRLSRKLINGIRDKQSGKTILDFLKSDGFANRNFMQLIHDDSLTFKEDIQKAQVSGQGDSLHEHIANLAGSPAIKKGILQTVKVVDELVKVMGRHKPENIVIEMARENQTTQKGQKNSRERMKRIEEGIKELGSQILKEHPVENTQLQNEKLYLYYLQNGRDMYVDQELDINRLSDYDVDHIVPQSFLKDDSIDNKVLTRSDKNRGKSDNVPSEEVVKKMKNYWRQLLNAKLITQRKFDNLTKAERGGLSELDKAGFIKRQLVETRQITKHVAQILDSRMNTKYDENDKLIREVKVITLKSKLVSDFRKDFQFYKVREINNYHHAHDAYLNAVVGTALIKKYPKLESEFVYGDYKVYDVRKMIAKSEQEIGKATAKYFFYSNIMNFFKTEITLANGEIRKRPLIETNGETGEIVWDKGRDFATVRKVLSMPQVNIVKKTEVQTGGFSKESILPKRNSDKLIARKKDWDPKKYGGFVSPTVAYSVLVVAKVEKGKSKKLKSVKELLGITIMERSSFEKNPIDFLEAKGYKEVKKDLIIKLPKYSLFELENGRKRMLASARELQKGNELALPSKYVNFLYLASHYEKLKGSPEDNEQKQLFVEQHKHYLDEIIEQISEFSKRVILADANLDKVLSAYNKHRDKPIREQAENIIHLFTLTNLGAPAAFKYFDTTIDRKEYRSTKEVLDATLIHQSITGLYETRIDLSQLGGDSGGSTNLSDIIEKETGKQLVIQESILMLPEEVEEVIGNKPESDILVHTAYDESTDENVMLLTSDAPEYKPWALVIQDSNGENKIKMLSGGSPKKKRKV

SEQ ID NO: 4286-4287 - skipped (2 entries)

SEQ ID NO: 4288 - protein, 4 aa, synthetic construct
  REGION 1..4: note = Synthetic Polypeptide
SGGS

SEQ ID NO: 4289-5083 - skipped (795 entries)

SEQ ID NO: 5084 - DNA, 51 bp, synthetic construct
  misc_feature 1..51: note = Synthetic Polynucleotide
  source 1..51: mol_type = other DNA
gtgggcccccacccgctagttgtcavcatgtactttgctactggcttcagt

SEQ ID NO: 5085 - DNA, 51 bp, synthetic construct
  misc_feature 1..51: note = Synthetic Polynucleotide
  source 1..51: mol_type = other DNA
ggtgactcccccatcccgcaggaccragttcctgagcgacaggtggatgct

SEQ ID NO: 5086 - DNA, 51 bp, synthetic construct
  misc_feature 1..51: note = Synthetic Polynucleotide
  source 1..51: mol_type = other DNA
gagtgtaccaaaacgtgccagaactrtgacctggagtgcatgagcatgggc

SEQ ID NO: 5087 - DNA, 51 bp, synthetic construct
  misc_feature 1..51: note = Synthetic Polynucleotide
  source 1..51: mol_type = other DNA
acctgcggcctgtgtgggaattacartggcaaccagggcgacgacttcctt

SEQ ID NO: 5088 - DNA, 51 bp, synthetic construct
  misc_feature 1..51: note = Synthetic Polynucleotide
  source 1..51: mol_type = other DNA
ctttagaaataccagatcctattatrtaatggagatgtagacatggcctgc

SEQ ID NO: 5089 - DNA, 51 bp, synthetic construct
  misc_feature 1..51: note = Synthetic Polynucleotide
  source 1..51: mol_type = other DNA
ttctattttcccccaattacaggaarttggccttgcctctctgggtgcacc

SEQ ID NO: 5090 - DNA, 51 bp, synthetic construct
  misc_feature 1..51: note = Synthetic Polynucleotide
  source 1..51: mol_type = other DNA
ttggtccccgcgcagccccagctcarcgtgtgcaactgggcggtcatggta

SEQ ID NO: 5091 - DNA, 51 bp, synthetic construct
  misc_feature 1..51: note = Synthetic Polynucleotide
  source 1..51: mol_type = other DNA
gtgcacggggccggtaatttggtcarcacttactatgacttttccaagggc

SEQ ID NO: 5092 - DNA, 51 bp, synthetic construct
  misc_feature 1..51: note = Synthetic Polynucleotide
  source 1..51: mol_type = other DNA
agcaccgaggccattctccattccarcaacaccagggacatggagtccgac

SEQ ID NO: 5093 - DNA, 51 bp, synthetic construct
  misc_feature 1..51: note = Synthetic Polynucleotide
  source 1..51: mol_type = other DNA
tgccactgccatcggggaccctccaratgtcattattgtttccaaccaaga

SEQ ID NO: 5094 - DNA, 51 bp, synthetic construct
  misc_feature 1..51: note = Synthetic Polynucleotide
  source 1..51: mol_type = other DNA
ctcacaaacctggacttgagtatcarccagatagctcgtggattgtggatt

SEQ ID NO: 5095 - DNA, 51 bp, synthetic construct
  misc_feature 1..51: note = Synthetic Polynucleotide
  source 1..51: mol_type = other DNA
tgcccttgtccctccaggagatggtracctgcacctcaatgtgacggcgga

SEQ ID NO: 5096 - DNA, 51 bp, synthetic construct
  misc_feature 1..51: note = Synthetic Polynucleotide
  source 1..51: mol_type = other DNA
tgtggcctgtgcccaagtgcctaagdtaaccctcatcattgggggctccta

SEQ ID NO: 5097 - DNA, 51 bp, synthetic construct
  misc_feature 1..51: note = Synthetic Polynucleotide
  source 1..51: mol_type = other DNA
ttcccaacccctttcttcccttcccrggggctgccgggaggctatcaaaag

SEQ ID NO: 5098 - DNA, 51 bp, synthetic construct
  misc_feature 1..51: note = Synthetic Polynucleotide
  source 1..51: mol_type = other DNA
tttagtaattgccccattgtccacartccccaactgggaaagggaattccg

SEQ ID NO: 5099 - DNA, 51 bp, synthetic construct
  misc_feature 1..51: note = Synthetic Polynucleotide
  source 1..51: mol_type = other DNA
tcaatgttccaggtctctggacactrtgggcacacgactcctcccagctct

SEQ ID NO: 5100 - DNA, 51 bp, synthetic construct
  misc_feature 1..51: note = Synthetic Polynucleotide
  source 1..51: mol_type = other DNA
tgtccctcatgccggcctggattttytttttttttttttttgagggatggg

SEQ ID NO: 5101 - DNA, 51 bp, synthetic construct
  misc_feature 1..51: note = Synthetic Polynucleotide
  source 1..51: mol_type = other DNA
cttctgccctgggccctgcttatcartgaatccaaatgggacctctggcta

SEQ ID NO: 5102 - DNA, 51 bp, synthetic construct
  misc_feature 1..51: note = Synthetic Polynucleotide
  source 1..51: mol_type = other DNA
gagaagagcaccatgcaggaactcadttctcggctggcctcttacttggat

SEQ ID NO: 5103 - DNA, 51 bp, synthetic construct
  misc_feature 1..51: note = Synthetic Polynucleotide
  source 1..51: mol_type = other DNA
ccaagtaacccctactgcgcctgctrcatgtctctcttccaggtgaacggc

SEQ ID NO: 5104 - DNA, 51 bp, synthetic construct
  misc_feature 1..51: note = Synthetic Polynucleotide
  source 1..51: mol_type = other DNA
ccaggcctccacttctacaccctcarccgcgagatggctaccacagaggtg

SEQ ID NO: 5105 - DNA, 51 bp, synthetic construct
  misc_feature 1..51: note = Synthetic Polynucleotide
  source 1..51: mol_type = other DNA
ggctacttgcctgtggtcatcgatarcttccataatgccttccgtggtgag

SEQ ID NO: 5106 - DNA, 51 bp, synthetic construct
  misc_feature 1..51: note = Synthetic Polynucleotide
  source 1..51: mol_type = other DNA
cagcccgtaacccttctggacatctrtacacactggcaacagtaagtggtg

SEQ ID NO: 5107 - DNA, 51 bp, synthetic construct
  misc_feature 1..51: note = Synthetic Polynucleotide
  source 1..51: mol_type = other DNA
acttcttaccaaacttaacggcaccrtaaccacccctggctggcccaagga

SEQ ID NO: 5108 - DNA, 51 bp, synthetic construct
  misc_feature 1..51: note = Synthetic Polynucleotide
  source 1..51: mol_type = other DNA
ggaaatgtatgccattggcttttgtratatcatcccttccttcttccactg

SEQ ID NO: 5109 - DNA, 51 bp, synthetic construct
  misc_feature 1..51: note = Synthetic Polynucleotide
  source 1..51: mol_type = other DNA
acatcacccacttggctcaagaccartggagcggtgaatgggaaggggtca

SEQ ID NO: 5110 - DNA, 51 bp, synthetic construct
  misc_feature 1..51: note = Synthetic Polynucleotide
  source 1..51: mol_type = other DNA
gataaatacccaaaggcccgttaccrttggctggtcttaccgtggacctcc

SEQ ID NO: 5111 - DNA, 51 bp, synthetic construct
  misc_feature 1..51: note = Synthetic Polynucleotide
  source 1..51: mol_type = other DNA
tggcgcaccccatcagaccatctacrgtgagtagggcttcaggctgggaag

SEQ ID NO: 5112 - DNA, 51 bp, synthetic construct
  misc_feature 1..51: note = Synthetic Polynucleotide
  source 1..51: mol_type = other DNA
aggaactcctgcaataacttcatctrtggaggctgccggggcaataagaac

SEQ ID NO: 5113 - DNA, 51 bp, synthetic construct
  misc_feature 1..51: note = Synthetic Polynucleotide
  source 1..51: mol_type = other DNA
gtgcagcccgtggtcaccctgtaccrctgggacctgccccagcgcctgcag

SEQ ID NO: 5114 - DNA, 51 bp, synthetic construct
  misc_feature 1..51: note = Synthetic Polynucleotide
  source 1..51: mol_type = other DNA
gttttcctaccctgagcgccccatcrtatttctcagtatgtgctataatat

SEQ ID NO: 5115 - DNA, 51 bp, synthetic construct
  misc_feature 1..51: note = Synthetic Polynucleotide
  source 1..51: mol_type = other DNA
atgggcctccactaggggaggccatdaggagcgccccacagtcatgctgtt

SEQ ID NO: 5116 - DNA, 51 bp, synthetic construct
  misc_feature 1..51: note = Synthetic Polynucleotide
  source 1..51: mol_type = other DNA
tccttccctgaccccaggggcctctrccacttctgcctctactggaaccga

SEQ ID NO: 5117 - DNA, 51 bp, synthetic construct
  misc_feature 1..51: note = Synthetic Polynucleotide
  source 1..51: mol_type = other DNA
ccgcagtacaacccaggggacaaagrtaccaaaattgccaagaggatggct

SEQ ID NO: 5118 - DNA, 51 bp, synthetic construct
  misc_feature 1..51: note = Synthetic Polynucleotide
  source 1..51: mol_type = other DNA
atgccgcgcctggtgcagtgtgccadcgtggccccctgccccaacatcgtg

SEQ ID NO: 5119 - DNA, 51 bp, synthetic construct
  misc_feature 1..51: note = Synthetic Polynucleotide
  source 1..51: mol_type = other DNA
tatccgcgccatgcctgtctacaaaraagctgagcacgtcacggaggtggt

SEQ ID NO: 5120 - DNA, 51 bp, synthetic construct
  misc_feature 1..51: note = Synthetic Polynucleotide
  source 1..51: mol_type = other DNA
cagctcttaaccactccagccactcrctctggcacctctgttttttccctt

SEQ ID NO: 5121 - DNA, 51 bp, synthetic construct
  misc_feature 1..51: note = Synthetic Polynucleotide
  source 1..51: mol_type = other DNA
aacttgtcccctccctgtgtcttctrgctgtgcagcaagatcttggagaag

SEQ ID NO: 5122 - DNA, 51 bp, synthetic construct
  misc_feature 1..51: note = Synthetic Polynucleotide
  source 1..51: mol_type = other DNA
cttatacttttcctagaagaggatcrctacttagccccagacttttaccat

SEQ ID NO: 5123 - DNA, 51 bp, synthetic construct
  misc_feature 1..51: note = Synthetic Polynucleotide
  source 1..51: mol_type = other DNA
gtgattatcaccagcaccagttcgtrttatgtgttttacatttacgtggga

SEQ ID NO: 5124 - DNA, 51 bp, synthetic construct
  misc_feature 1..51: note = Synthetic Polynucleotide
  source 1..51: mol_type = other DNA
tctcagaccccaatcctaagccctcrggaggttgtgtcttgtagccagtat

SEQ ID NO: 5125 - DNA, 51 bp, synthetic construct
  misc_feature 1..51: note = Synthetic Polynucleotide
  source 1..51: mol_type = other DNA
tccgacccctccaacctgcggccctrgagcgcccccgccgccccgggggaa

SEQ ID NO: 5126 - DNA, 51 bp, synthetic construct
  misc_feature 1..51: note = Synthetic Polynucleotide
  source 1..51: mol_type = other DNA
tccttgtcccgagaatcttccttacrgtaccattcaggaatggggactgtg

SEQ ID NO: 5127 - DNA, 51 bp, synthetic construct
  misc_feature 1..51: note = Synthetic Polynucleotide
  source 1..51: mol_type = other DNA
acagatcaccgtcctgctgggccacracggtgccgggaagaccaccaccct

SEQ ID NO: 5128 - DNA, 51 bp, synthetic construct
  misc_feature 1..51: note = Synthetic Polynucleotide
  source 1..51: mol_type = other DNA
ctggtggccccgctgatcatctaccrtgtcattgatgccaacagcccactc

SEQ ID NO: 5129 - DNA, 51 bp, synthetic construct
  misc_feature 1..51: note = Synthetic Polynucleotide
  source 1..51: mol_type = other DNA
tctccccctccaccaggtggtggtartcttggaatgaacagtaggaaacca

SEQ ID NO: 5130 - DNA, 51 bp, synthetic construct
  misc_feature 1..51: note = Synthetic Polynucleotide
  source 1..51: mol_type = other DNA
tttttaggaccctggtttgatatgtrcctatctgctcgagactccgttgtt

SEQ ID NO: 5131 - DNA, 51 bp, synthetic construct
  misc_feature 1..51: note = Synthetic Polynucleotide
  source 1..51: mol_type = other DNA
gtgcgccgcgcccaggacttcgtgtrccacctgcactgctttgcctgcgtc

SEQ ID NO: 5132 - DNA, 51 bp, synthetic construct
  misc_feature 1..51: note = Synthetic Polynucleotide
  source 1..51: mol_type = other DNA
cagatcacctccttcctgggccacartggagcggggaagacgaccaccatg

SEQ ID NO: 5133 - DNA, 51 bp, synthetic construct
  misc_feature 1..51: note = Synthetic Polynucleotide
  source 1..51: mol_type = other DNA
gatggcagagcccggtaatcgcataraacttaaaactttacagtcagaggt

SEQ ID NO: 5134 - DNA, 51 bp, synthetic construct
  misc_feature 1..51: note = Synthetic Polynucleotide
  source 1..51: mol_type = other DNA
gcattccccctcaaacctaagaaatrtgtctgataaaagagttactttgat

SEQ ID NO: 5135 - DNA, 51 bp, synthetic construct
  misc_feature 1..51: note = Synthetic Polynucleotide
  source 1..51: mol_type = other DNA
tccaaagacaaccatcattccccctraataaattaaaaaaactattaaacc

SEQ ID NO: 5136 - DNA, 51 bp, synthetic construct
  misc_feature 1..51: note = Synthetic Polynucleotide
  source 1..51: mol_type = other DNA
ccaatctcagccaagcttgttgcaartatgctatctgtagcaggtgcagat

SEQ ID NO: 5137 - DNA, 51 bp, synthetic construct
  misc_feature 1..51: note = Synthetic Polynucleotide
  source 1..51: mol_type = other DNA
gcggagccctggggccgtcgcacctrtgtcacctggattgccctgatggtg

SEQ ID NO: 5138 - DNA, 51 bp, synthetic construct
  misc_feature 1..51: note = Synthetic Polynucleotide
  source 1..51: mol_type = other DNA
atcgccctccctgctaccttcgtcarcagtgccatccgttacctggagggc

SEQ ID NO: 5139 - DNA, 51 bp, synthetic construct
  misc_feature 1..51: note = Synthetic Polynucleotide
  source 1..51: mol_type = other DNA
agcaccatccctgagctcattaactrccatcagcacaactctgcaggtgag

SEQ ID NO: 5140 - DNA, 51 bp, synthetic construct
  misc_feature 1..51: note = Synthetic Polynucleotide
  source 1..51: mol_type = other DNA
ctacacgcacccgagctccctgcgcraacacatgaaggtaattacctcttt

SEQ ID NO: 5141 - DNA, 51 bp, synthetic construct
  misc_feature 1..51: note = Synthetic Polynucleotide
  source 1..51: mol_type = other DNA
ttggacattgccttcttgttactctrtttcaatgatactcataaaagcatt

SEQ ID NO: 5142 - DNA, 51 bp, synthetic construct
  misc_feature 1..51: note = Synthetic Polynucleotide
  source 1..51: mol_type = other DNA
attaatgaccacagcggtcatctctrcctgcgaccatggtatagtagccaa

SEQ ID NO: 5143 - DNA, 51 bp, synthetic construct
  misc_feature 1..51: note = Synthetic Polynucleotide
  source 1..51: mol_type = other DNA
cgcaggacaccgctctatgacttccrcctggcccacggcgggaaaatggtg

SEQ ID NO: 5144 - DNA, 51 bp, synthetic construct
  misc_feature 1..51: note = Synthetic Polynucleotide
  source 1..51: mol_type = other DNA
tgccacgccctggccacatgtgtcartgtggtgggcagctacttgtgcgta

SEQ ID NO: 5145 - DNA, 51 bp, synthetic construct
  misc_feature 1..51: note = Synthetic Polynucleotide
  source 1..51: mol_type = other DNA
tctctccccgcaggaatcctgtactrtgtctacatggggctgctggcagtg

SEQ ID NO: 5146 - DNA, 51 bp, synthetic construct
  misc_feature 1..51: note = Synthetic Polynucleotide
  source 1..51: mol_type = other DNA
ctgccatgccagccgcttcctgcacrtgaaggtggaatgccccacagaact

SEQ ID NO: 5147 - DNA, 51 bp, synthetic construct
  misc_feature 1..51: note = Synthetic Polynucleotide
  source 1..51: mol_type = other DNA
tgcccagccccacatccagtggatcragcacgtggaaaagaacggcagtaa

SEQ ID NO: 5148 - DNA, 51 bp, synthetic construct
  misc_feature 1..51: note = Synthetic Polynucleotide
  source 1..51: mol_type = other DNA
accattgccgccctgctgagcccctrctcctattccaccacggctgtcgtc

SEQ ID NO: 5149 - DNA, 51 bp, synthetic construct
  misc_feature 1..51: note = Synthetic Polynucleotide
  source 1..51: mol_type = other DNA
cgactccggcccccgccgctacaccrttgccgccctgctgagcccctactc

SEQ ID NO: 5150 - DNA, 51 bp, synthetic construct
  misc_feature 1..51: note = Synthetic Polynucleotide
  source 1..51: mol_type = other DNA
acccgccaccttctgctggccaacarcagccttcagtccgtgcccccggga

SEQ ID NO: 5151 - DNA, 51 bp, synthetic construct
  misc_feature 1..51: note = Synthetic Polynucleotide
  source 1..51: mol_type = other DNA
acgggaagccctcatgtctgaactcraagtcctgagttaccttggtaatca

SEQ ID NO: 5152 - DNA, 51 bp, synthetic construct
  misc_feature 1..51: note = Synthetic Polynucleotide
  source 1..51: mol_type = other DNA
tcccctcattcctcatagatcttccrctatgccaagggacaaccctacatt

SEQ ID NO: 5153 - DNA, 51 bp, synthetic construct
  misc_feature 1..51: note = Synthetic Polynucleotide
  source 1..51: mol_type = other DNA
aaaatggcaatcctcatcttcaccgrtttcacctgcatggcacctatctct

SEQ ID NO: 5154 - DNA, 51 bp, synthetic construct
  misc_feature 1..51: note = Synthetic Polynucleotide
  source 1..51: mol_type = other DNA
ccgccgcgtccgccgcctccggaacyaaacggggtgaggtcacattcggtt

SEQ ID NO: 5155 - DNA, 51 bp, synthetic construct
  misc_feature 1..51: note = Synthetic Polynucleotide
  source 1..51: mol_type = other DNA
tgagaaggccaccatgcagaacctcvatgaccgcctggcctcctacctgga

SEQ ID NO: 5156 - DNA, 51 bp, synthetic construct
  misc_feature 1..51: note = Synthetic Polynucleotide
  source 1..51: mol_type = other DNA
gagaaggccaccatgcagaacctcartgaccgcctggcctcctacctggac

SEQ ID NO: 5157 - DNA, 51 bp, synthetic construct
  misc_feature 1..51: note = Synthetic Polynucleotide
  source 1..51: mol_type = other DNA
ttgtctttcctgcaggcgtctctccragtcgacacttttcctgatcccact

SEQ ID NO: 5158 - DNA, 51 bp, synthetic construct
  misc_feature 1..51: note = Synthetic Polynucleotide
  source 1..51: mol_type = other DNA
gccggccgccccgagcgtgcgccctdccgcgacctgcgttgcgtggcgccc

SEQ ID NO: 5159 - DNA, 51 bp, synthetic construct
  misc_feature 1..51: note = Synthetic Polynucleotide
  source 1..51: mol_type = other DNA
cctccacccccactctaggtgtcctvtgtgaaagccattgacatttggatg

SEQ ID NO: 5160 - DNA, 51 bp, synthetic construct
  misc_feature 1..51: note = Synthetic Polynucleotide
  source 1..51: mol_type = other DNA
cgcctccccgcaccccagtgcatccrcagagacctggctgctcggaacatt

SEQ ID NO: 5161 - DNA, 51 bp, synthetic construct
  misc_feature 1..51: note = Synthetic Polynucleotide
  source 1..51: mol_type = other DNA
accgggctgtcccctggggtcacctrttacttcaaagtctttgcagtgagc

SEQ ID NO: 5162 - DNA, 51 bp, synthetic construct
  misc_feature 1..51: note = Synthetic Polynucleotide
  source 1..51: mol_type = other DNA
ggcttatccgatggcccctactccarcccttatgagaacagccttatccca

SEQ ID NO: 5163 - DNA, 51 bp, synthetic construct
  misc_feature 1..51: note = Synthetic Polynucleotide
  source 1..51: mol_type = other DNA
cgtctaccccctcacccaatctaccytgatgggatatggaatcccaggctt

SEQ ID NO: 5164 - DNA, 51 bp, synthetic construct
  misc_feature 1..51: note = Synthetic Polynucleotide
  source 1..51: mol_type = other DNA
acggaaggctcccagaacatcacctrccactgcaagaacagcattgcctat

SEQ ID NO: 5165 - DNA, 51 bp, synthetic construct
  misc_feature 1..51: note = Synthetic Polynucleotide
  source 1..51: mol_type = other DNA
ctctggaatccattctggtgccactnccacagctccttctctgagtggtaa

SEQ ID NO: 5166 - DNA, 51 bp, synthetic construct
  misc_feature 1..51: note = Synthetic Polynucleotide
  source 1..51: mol_type = other DNA
ggatttggaccctgaggtcagaccarcttcagccgtggctgcctgagacct

SEQ ID NO: 5167 - DNA, 51 bp, synthetic construct
  misc_feature 1..51: note = Synthetic Polynucleotide
  source 1..51: mol_type = other DNA
tgcagagcaatccagagcggccatcracaaatgggtgtccaataagaccga

SEQ ID NO: 5168 - DNA, 51 bp, synthetic construct
  misc_feature 1..51: note = Synthetic Polynucleotide
  source 1..51: mol_type = other DNA
tacagacacccagaacatcttcttcrtgagcaaagtcaccaatcccaagca

SEQ ID NO: 5169 - DNA, 51 bp, synthetic construct
  misc_feature 1..51: note = Synthetic Polynucleotide
  source 1..51: mol_type = other DNA
cttcctgacccagcactatgatgccraaccacagggccgggatgacagata

SEQ ID NO: 5170 - DNA, 51 bp, synthetic construct
  misc_feature 1..51: note = Synthetic Polynucleotide
  source 1..51: mol_type = other DNA
gaggcccccctcaatcccaaggccarccgcgagaagatgacccagatcatg

SEQ ID NO: 5171 - DNA, 51 bp, synthetic construct
  misc_feature 1..51: note = Synthetic Polynucleotide
  source 1..51: mol_type = other DNA
gatcttcagcctgtactcgctggtcracgcctttcagtggatccagtacag

SEQ ID NO: 5172 - DNA, 51 bp, synthetic construct
  misc_feature 1..51: note = Synthetic Polynucleotide
  source 1..51: mol_type = other DNA
gaagcaggccttcgacatcaccatcrtgatcctcatctgcctcaacatggt

SEQ ID NO: 5173 - DNA, 51 bp, synthetic construct
  misc_feature 1..51: note = Synthetic Polynucleotide
  source 1..51: mol_type = other DNA
gaaccaaagcctgttggcttaaacartaaagagcgtttccgcacggccttc

SEQ ID NO: 5174 - DNA, 51 bp, synthetic construct
  misc_feature 1..51: note = Synthetic Polynucleotide
  source 1..51: mol_type = other DNA
aatgccgaacctaagcacaatagcartagacagttagaaagaagtggaaga

SEQ ID NO: 5175 - DNA, 51 bp, synthetic construct
  misc_feature 1..51: note = Synthetic Polynucleotide
  source 1..51: mol_type = other DNA
tgctgcccctgcatcctccaccttcrgggccatgagaagttgctgaggaca

SEQ ID NO: 5176 - DNA, 51 bp, synthetic construct
  misc_feature 1..51: note = Synthetic Polynucleotide
  source 1..51: mol_type = other DNA
agaacttccattgatggcttcttttrgggtgaaccaggtagtataattatg

SEQ ID NO: 5177 - DNA, 51 bp, synthetic construct
  misc_feature 1..51: note = Synthetic Polynucleotide
  source 1..51: mol_type = other DNA
ttgctatcctttctttatcttactcrggtgatgagatatgtgaaccaggcc

SEQ ID NO: 5178 - DNA, 51 bp, synthetic construct
  misc_feature 1..51: note = Synthetic Polynucleotide
  source 1..51: mol_type = other DNA
ctcatgaaccagaaccttgacatctrtgaacagcaagtgatgactgcagcc

SEQ ID NO: 5179 - DNA, 51 bp, synthetic construct
  misc_feature 1..51: note = Synthetic Polynucleotide
  source 1..51: mol_type = other DNA
cttgttgaccgctaccgtaaacacarcctctactttgaggcagcattcgat

SEQ ID NO: 5180 - DNA, 51 bp, synthetic construct
  misc_feature 1..51: note = Synthetic Polynucleotide
  source 1..51: mol_type = other DNA
cagctggcccgacctggtgtccccarggtgatccctacccctaccatgcct

SEQ ID NO: 5181 - DNA, 51 bp, synthetic construct
  misc_feature 1..51: note = Synthetic Polynucleotide
  source 1..51: mol_type = other DNA
ggggcgccccggcgccgcaagctctrctgcgccacgaagtaccacctccag

SEQ ID NO: 5182 - DNA, 51 bp, synthetic construct
  misc_feature 1..51: note = Synthetic Polynucleotide
  source 1..51: mol_type = other DNA
tgtgaatgccccgaaggctacagatrtaatctcaaatcaaagtcttgtgaa

SEQ ID NO: 5183 - DNA, 51 bp, synthetic construct
  misc_feature 1..51: note = Synthetic Polynucleotide
  source 1..51: mol_type = other DNA
ttctgccacctctgtacaaaagacarttttacttgtgtgacagatgggctc

SEQ ID NO: 5184 - DNA, 51 bp, synthetic construct
  misc_feature 1..51: note = Synthetic Polynucleotide
  source 1..51: mol_type = other DNA
gtagcttacctcctcaaagcaatacrctgaaaatgtttagacgggctcaca

SEQ ID NO: 5185 - DNA, 51 bp, synthetic construct
  misc_feature 1..51: note = Synthetic Polynucleotide
  source 1..51: mol_type = other DNA
ctaagaataaccaatcaggtaatctrcttgaatccaccaattgaagagtgc

SEQ ID NO: 5186 - DNA, 51 bp, synthetic construct
  misc_feature 1..51: note = Synthetic Polynucleotide
  source 1..51: mol_type = other DNA
atgctctcttccttccctccaggctvcttgtacctggccattgagtacgcg

SEQ ID NO: 5187 - DNA, 51 bp, synthetic construct
  misc_feature 1..51: note = Synthetic Polynucleotide
  source 1..51: mol_type = other DNA
catgtacattgccatcatcctggagracttcagtgtagccacagaggaaag

SEQ ID NO: 5188 - DNA, 51 bp, synthetic construct
  misc_feature 1..51: note = Synthetic Polynucleotide
  source 1..51: mol_type = other DNA
catcataaaaaccaaacacttctctrtaatctttttgacatttctcagtct

SEQ ID NO: 5189 - DNA, 51 bp, synthetic construct
  misc_feature 1..51: note = Synthetic Polynucleotide
  source 1..51: mol_type = other DNA
tacttgcccacctggcagaaaatctrcttctacagttggggctgacagacc

SEQ ID NO: 5190 - DNA, 51 bp, synthetic construct
  misc_feature 1..51: note = Synthetic Polynucleotide
  source 1..51: mol_type = other DNA
gtttttgttttccctcaaaggttcarcatacaaatttagggtcattgccat

SEQ ID NO: 5191 - DNA, 51 bp, synthetic construct
  misc_feature 1..51: note = Synthetic Polynucleotide
  source 1..51: mol_type = other DNA
tactttgccctcagcatctcccttcrtgtctgggtcatggtaagagtggca

SEQ ID NO: 5192 - DNA, 51 bp, synthetic construct
  misc_feature 1..51: note = Synthetic Polynucleotide
  source 1..51: mol_type = other DNA
gttgatcaaaccaccgtggacacctyctttgcccatcagcaggactagcgc

SEQ ID NO: 5193 - DNA, 51 bp, synthetic construct
  misc_feature 1..51: note = Synthetic Polynucleotide
  source 1..51: mol_type = other DNA
ggtcatcctggcccctttgcagagaracactgcagaagctaagacatagga

SEQ ID NO: 5194 - DNA, 51 bp, synthetic construct
  misc_feature 1..51: note = Synthetic Polynucleotide
  source 1..51: mol_type = other DNA
gacatttcccctcaagcaccaacacrttttctggtgatacccaagaaacat

SEQ ID NO: 5195 - DNA, 51 bp, synthetic construct
  misc_feature 1..51: note = Synthetic Polynucleotide
  source 1..51: mol_type = other DNA
gactaaccctgcagtgctttccctcrgtgcatccaccgggacgtggcagcg

SEQ ID NO: 5196 - DNA, 51 bp, synthetic construct
  misc_feature 1..51: note = Synthetic Polynucleotide
  source 1..51: mol_type = other DNA
gcggcagagcgccagcgagcgggagraactgcgcatgcgcacgctggcccg

SEQ ID NO: 5197 - DNA, 51 bp, synthetic construct
  misc_feature 1..51: note = Synthetic Polynucleotide
  source 1..51: mol_type = other DNA
taggggaggccataaggagcgccccrcagtcatgctgtttccctttaggaa

SEQ ID NO: 5198 - DNA, 51 bp, synthetic construct
  misc_feature 1..51: note = Synthetic Polynucleotide
  source 1..51: mol_type = other DNA
gccgttagcctgatcatcttcacctrctacaccgcctgggtgattctcttg

SEQ ID NO: 5199 - DNA, 51 bp, synthetic construct
  misc_feature 1..51: note = Synthetic Polynucleotide
  source 1..51: mol_type = other DNA
aaggatggctccattgtcatacacarcctagactacagtgacaatggcacg

SEQ ID NO: 5200 - DNA, 51 bp, synthetic construct
  misc_feature 1..51: note = Synthetic Polynucleotide
  source 1..51: mol_type = other DNA
acccggatttgccacaaaagaaattrcaaatggaaagcctttcttcaaagg

SEQ ID NO: 5201 - DNA, 51 bp, synthetic construct
  misc_feature 1..51: note = Synthetic Polynucleotide
  source 1..51: mol_type = other DNA
ggcctgtaatcctgcctgcttcatcrcacagctcctccctgtgaaaaggaa

SEQ ID NO: 5202 - DNA, 51 bp, synthetic construct
  misc_feature 1..51: note = Synthetic Polynucleotide
  source 1..51: mol_type = other DNA
agcggccatccctgagggacagttcrttgatagcaggaagggggcagagaa

SEQ ID NO: 5203 - DNA, 51 bp, synthetic construct
  misc_feature 1..51: note = Synthetic Polynucleotide
  source 1..51: mol_type = other DNA
agcatgtattacccacgggtacaacrttaccgagagctgcttgactccttg

SEQ ID NO: 5204 - DNA, 51 bp, synthetic construct
  misc_feature 1..51: note = Synthetic Polynucleotide
  source 1..51: mol_type = other DNA
actaccatccgagtctgttgcactaytggggtctcggtcaaggtcagactc

SEQ ID NO: 5205 - DNA, 51 bp, synthetic construct
  misc_feature 1..51: note = Synthetic Polynucleotide
  source 1..51: mol_type = other DNA
taccaaggccagctgcccttccccarccacgccgagaagcagaagcagttc

SEQ ID NO: 5206 - DNA, 51 bp, synthetic construct
  misc_feature 1..51: note = Synthetic Polynucleotide
  source 1..51: mol_type = other DNA
tttttatttttcctgagtagaccatrtccttaaatgtaaaaggccctggac

SEQ ID NO: 5207 - DNA, 51 bp, synthetic construct
  misc_feature 1..51: note = Synthetic Polynucleotide
  source 1..51: mol_type = other DNA
aaggccatgccctccagcaccttcaycaggaaatcgtcctctaccagccca

SEQ ID NO: 5208 - DNA, 51 bp, synthetic construct
  misc_feature 1..51: note = Synthetic Polynucleotide
  source 1..51: mol_type = other DNA
gttccatccccaaaaggaggctgaaratcagcacaataagatcctatatcg

SEQ ID NO: 5209 - DNA, 51 bp, synthetic construct
  misc_feature 1..51: note = Synthetic Polynucleotide
  source 1..51: mol_type = other DNA
cgcacccacgtccagggccgcgtctrcaacttcctcgagcgtcccaccggc

SEQ ID NO: 5210 - DNA, 51 bp, synthetic construct
  misc_feature 1..51: note = Synthetic Polynucleotide
  source 1..51: mol_type = other DNA
cagggaccccagcgcccgagagaccrtgcagaggtcgcctctggaaaaggc

SEQ ID NO: 5211 - DNA, 51 bp, synthetic construct
  misc_feature 1..51: note = Synthetic Polynucleotide
  source 1..51: mol_type = other DNA
gaacctgtctccacaaagtgtgaccrcatattttgcaagtaagtttgaatg

SEQ ID NO: 5212 - DNA, 51 bp, synthetic construct
  misc_feature 1..51: note = Synthetic Polynucleotide
  source 1..51: mol_type = other DNA
gttttctccttccatttatctttctrggtcatccccttctaaatgcccatc

SEQ ID NO: 5213 - DNA, 51 bp, synthetic construct
  misc_feature 1..51: note = Synthetic Polynucleotide
  source 1..51: mol_type = other DNA
aaacacaagcaccaccttatcgagcrctcaaggcttcactcgggcgagaag

SEQ ID NO: 5214 - DNA, 51 bp, synthetic construct
  misc_feature 1..51: note = Synthetic Polynucleotide
  source 1..51: mol_type = other DNA
tgtcccggcctgcagagcttggactrtgacaacagtgagaaccagctgttc

SEQ ID NO: 5215 - DNA, 51 bp, synthetic construct
  misc_feature 1..51: note = Synthetic Polynucleotide
  source 1..51: mol_type = other DNA
cgccacgcccgccgcagcagcttcayggcgcccgcgccgggccggcggccc

SEQ ID NO: 5216 - DNA, 51 bp, synthetic construct
  misc_feature 1..51: note = Synthetic Polynucleotide
  source 1..51: mol_type = other DNA
tcctgcaccgagagagatggaataargcccttgaaccagccctgctgtgcc

SEQ ID NO: 5217 - DNA, 51 bp, synthetic construct
  misc_feature 1..51: note = Synthetic Polynucleotide
  source 1..51: mol_type = other DNA
tgggccctgtaccacctctcaaaggrccctgagatccaggaggccttgcac

SEQ ID NO: 5218 - DNA, 51 bp, synthetic construct
  misc_feature 1..51: note = Synthetic Polynucleotide
  source 1..51: mol_type = other DNA
ctacctgtacaccgtggtggccttcracttcttccgcaagttctacaacaa

SEQ ID NO: 5219 - DNA, 51 bp, synthetic construct
  misc_feature 1..51: note = Synthetic Polynucleotide
  source 1..51: mol_type = other DNA
caccccggccgcatcgccgtccactncttcaagggctggttcctcatcgac

SEQ ID NO: 5220 - DNA, 51 bp, synthetic construct
  misc_feature 1..51: note = Synthetic Polynucleotide
  source 1..51: mol_type = other DNA
ccgagtcctccgggccctgaaaactrtatcagtcatttcaggtgaaaatca

SEQ ID NO: 5221 - DNA, 51 bp, synthetic construct
  misc_feature 1..51: note = Synthetic Polynucleotide
  source 1..51: mol_type = other DNA
tattttacccattgttttctcatacrggttataagcacatgtccttggccc

SEQ ID NO: 5222 - DNA, 51 bp, synthetic construct
  misc_feature 1..51: note = Synthetic Polynucleotide
  source 1..51: mol_type = other DNA
gttagctccttcttgccaaccaaccrtgagctcccagattcgtcagaatta

SEQ ID NO: 5223 - DNA, 51 bp, synthetic construct
  misc_feature 1..51: note = Synthetic Polynucleotide
  source 1..51: mol_type = other DNA
gtcatggtgtccctgctgacagattrctcacctcagctccagaagcctaaa

SEQ ID NO: 5224 - DNA, 51 bp, synthetic construct
  misc_feature 1..51: note = Synthetic Polynucleotide
  source 1..51: mol_type = other DNA
tgttttcttaccacacaagatattcdtttgggtgtgaatgaaagtctcacg

SEQ ID NO: 5225 - DNA, 51 bp, synthetic construct
  misc_feature 1..51: note = Synthetic Polynucleotide
  source 1..51: mol_type = other DNA
taccatcctatccagatcctggctgdttacctcacgctccaggttggttta

SEQ ID NO: 5226 - DNA, 51 bp, synthetic construct
  misc_feature 1..51: note = Synthetic Polynucleotide
  source 1..51: mol_type = other DNA
catcctatccagatcctggctgattrcctcacgctccaggttggtttattt

SEQ ID NO: 5227 - DNA, 51 bp, synthetic construct
  misc_feature 1..51: note = Synthetic Polynucleotide
  source 1..51: mol_type = other DNA
tctccttcatcccgtgccttttaggracactatagctctctgaaaggtctt

SEQ ID NO: 5228 - DNA, 51 bp, synthetic construct
  misc_feature 1..51: note = Synthetic Polynucleotide
  source 1..51: mol_type = other DNA
ccagctagccccagacttcggccccrtgcggctcacccgctgccaggctgc

SEQ ID NO: 5229 - DNA, 51 bp, synthetic construct
  misc_feature 1..51: note = Synthetic Polynucleotide
  source 1..51: mol_type = other DNA
agccttccagacccagaagccattgraatctacctctctttcactgtttta

SEQ ID NO: 5230 - DNA, 51 bp, synthetic construct
  misc_feature 1..51: note = Synthetic Polynucleotide
  source 1..51: mol_type = other DNA
aaaagatcctgagaagaaaactcctyctacagcagcaaaggccaccactct

SEQ ID NO: 5231 - DNA, 51 bp, synthetic construct
  misc_feature 1..51: note = Synthetic Polynucleotide
  source 1..51: mol_type = other DNA
cactcgaacgacccattcaacgtctdcatcgagtccgatgcctggcaagag

SEQ ID NO: 5232 - DNA, 51 bp, synthetic construct
  misc_feature 1..51: note = Synthetic Polynucleotide
  source 1..51: mol_type = other DNA
aagcacatggccgactaccccgactrcaagtaccggccccggaaaaagccc

SEQ ID NO: 5233 - DNA, 51 bp, synthetic construct
  misc_feature 1..51: note = Synthetic Polynucleotide
  source 1..51: mol_type = other DNA
aatctcagccaagcttgttgcaaatrtgctatctgtagcaggtgcagatca

SEQ ID NO: 5234 - DNA, 51 bp, synthetic construct
  misc_feature 1..51: note = Synthetic Polynucleotide
  source 1..51: mol_type = other DNA
tctcctccctgcttctgtctcctacrgccacctgaagtccaaaaagggtca

SEQ ID NO: 5235 - DNA, 51 bp, synthetic construct
  misc_feature 1..51: note = Synthetic Polynucleotide
  source 1..51: mol_type = other DNA
cgagaaaaccgtcttcaccgtcttcrtgctagctgcctctggcatctgcat

SEQ ID NO: 5236 - DNA, 51 bp, synthetic construct
  misc_feature 1..51: note = Synthetic Polynucleotide
  source 1..51: mol_type = other DNA
ttaatcagccacaatgatgtcctaaractgtgtgactttggtaagttaaaa

SEQ ID NO: 5237 - DNA, 51 bp, synthetic construct
  misc_feature 1..51: note = Synthetic Polynucleotide
  source 1..51: mol_type = other DNA
atccagaccaccttcatagccaacaytgtcaaaagcaaaactcttcttcat

SEQ ID NO: 5238 - DNA, 51 bp, synthetic construct
  misc_feature 1..51: note = Synthetic Polynucleotide
  source 1..51: mol_type = other DNA
gtggctaccaacattgatgagatctrtaaggccctgtcccgcaatagcagt

SEQ ID NO: 5239 - DNA, 51 bp, synthetic construct
  misc_feature 1..51: note = Synthetic Polynucleotide
  source 1..51: mol_type = other DNA
gaaccttccaaactgaagcgctcctdctcctccccagatataacccaggct

SEQ ID NO: 5240 - DNA, 51 bp, synthetic construct
  misc_feature 1..51: note = Synthetic Polynucleotide
  source 1..51: mol_type = other DNA
tctgctaccgctgccccccttcccarggctacaatgacgactactatgaag

SEQ ID NO: 5241 - DNA, 51 bp, synthetic construct
  misc_feature 1..51: note = Synthetic Polynucleotide
  source 1..51: mol_type = other DNA
ctacgtgcccttctctgctggccccrggaactgtataggtttgtatccatc

SEQ ID NO: 5242 - DNA, 51 bp, synthetic construct
  misc_feature 1..51: note = Synthetic Polynucleotide
  source 1..51: mol_type = other DNA
ctgtaccaccatccactacaactacrtgtgtaacagttcctgcatgggcgg

SEQ ID NO: 5243 - DNA, 51 bp, synthetic construct
  misc_feature 1..51: note = Synthetic Polynucleotide
  source 1..51: mol_type = other DNA
ctcacccgtcccctctcctctgcagractatgaacacttatttaaggtgaa

SEQ ID NO: 5244 - DNA, 51 bp, synthetic construct
  misc_feature 1..51: note = Synthetic Polynucleotide
  source 1..51: mol_type = other DNA
aacaccccctttctttttttttcaargcgaaggacaaggttgcccttttga

SEQ ID NO: 5245 - DNA, 51 bp, synthetic construct
  misc_feature 1..51: note = Synthetic Polynucleotide
  source 1..51: mol_type = other DNA
ggagaaggcctgggaggagatacacrtttcgacaatgctgagaagtggact

SEQ ID NO: 5246 - DNA, 51 bp, synthetic construct
  misc_feature 1..51: note = Synthetic Polynucleotide
  source 1..51: mol_type = other DNA
cacaatgatgtcctaaaactgtgtgrctttggtaagttaaaaagaaattaa

SEQ ID NO: 5247 - DNA, 51 bp, synthetic construct
  misc_feature 1..51: note = Synthetic Polynucleotide
  source 1..51: mol_type = other DNA
ccggactactgcctatcaccattgcrctttattatgtagtactgatgggac

SEQ ID NO: 5248 - DNA, 51 bp, synthetic construct
  misc_feature 1..51: note = Synthetic Polynucleotide
  source 1..51: mol_type = other DNA
agtttcttccacttggaccaccaccrcctcggccacaggtctacccacctt

SEQ ID NO: 5249 - DNA, 51 bp, synthetic construct
  misc_feature 1..51: note = Synthetic Polynucleotide
  source 1..51: mol_type = other DNA
ttgctcaattccagtctttaccaccyaaaaaacatataaagcacttgctca

SEQ ID NO: 5250 - DNA, 51 bp, synthetic construct
  misc_feature 1..51: note = Synthetic Polynucleotide
  source 1..51: mol_type = other DNA
gtgtactcctgtgagtggcctctttrtatgtggccctttcaaaaggtgaga

SEQ ID NO: 5251 - DNA, 51 bp, synthetic construct
  misc_feature 1..51: note = Synthetic Polynucleotide
  source 1..51: mol_type = other DNA
tggtccagcctggagatcaccttcancctgcgagatgtgagttggctgccc

SEQ ID NO: 5252 - DNA, 51 bp, synthetic construct
  misc_feature 1..51: note = Synthetic Polynucleotide
  source 1..51: mol_type = other DNA
gctccccctctcctgcactccacagrcctcatcgtggtcgtggcctccatg

SEQ ID NO: 5253 - DNA, 51 bp, synthetic construct
  misc_feature 1..51: note = Synthetic Polynucleotide
  source 1..51: mol_type = other DNA
caccatgtccttgttggcagctaacracttgctggctggcctgagagggga

SEQ ID NO: 5254 - DNA, 51 bp, synthetic construct
  misc_feature 1..51: note = Synthetic Polynucleotide
  source 1..51: mol_type = other DNA
actttgtcttccttgacgatattctrctttattcaatatgctcattatgtg

SEQ ID NO: 5255 - DNA, 51 bp, synthetic construct
  misc_feature 1..51: note = Synthetic Polynucleotide
  source 1..51: mol_type = other DNA
gtgggcatcagccgtgagcatgccaraatcttcaactacggccgcatctat

SEQ ID NO: 5256 - DNA, 51 bp, synthetic construct
  misc_feature 1..51: note = Synthetic Polynucleotide
  source 1..51: mol_type = other DNA
tctgagtgcctgttctcgctcatcartggggacgacatgtttgtgacgttc

SEQ ID NO: 5257 - DNA, 51 bp, synthetic construct
  misc_feature 1..51: note = Synthetic Polynucleotide
  source 1..51: mol_type = other DNA
tcgctttcccatccttttccttcccrgggctactttggagacccctggaat

SEQ ID NO: 5258 - DNA, 51 bp, synthetic construct
  misc_feature 1..51: note = Synthetic Polynucleotide
  source 1..51: mol_type = other DNA
caagctgtctacctcttcgtgcaatrtatcatcatggtgaacctgttgatt

SEQ ID NO: 5259 - DNA, 51 bp, synthetic construct
  misc_feature 1..51: note = Synthetic Polynucleotide
  source 1..51: mol_type = other DNA
aataaaccctctgcttttgctctatrgttaatcagctcaaagatttgttgc

SEQ ID NO: 5260 - DNA, 51 bp, synthetic construct
  misc_feature 1..51: note = Synthetic Polynucleotide
  source 1..51: mol_type = other DNA
cagcatgccctgctctgtgcctcacrgaactacaggatctcatgcacatct

SEQ ID NO: 5261 - DNA, 23 bp, synthetic construct
  misc_feature 1..23: note = Synthetic Polynucleotide
  source 1..23: mol_type = other DNA
ccacccgctagttgtcavcatgt

SEQ ID NO: 5262 - DNA, 23 bp, synthetic construct
  misc_feature 1..23: note = Synthetic Polynucleotide
  source 1..23: mol_type = other DNA
ccccatcccgcaggaccragttc

SEQ ID NO: 5263 - DNA, 23 bp, synthetic construct
  misc_feature 1..23: note = Synthetic Polynucleotide
  source 1..23: mol_type = other DNA
ccaaaacgtgccagaactrtgac

SEQ ID NO: 5264 - DNA, 23 bp, synthetic construct
  misc_feature 1..23: note = Synthetic Polynucleotide
  source 1..23: mol_type = other DNA
cctgtgtgggaattacartggca

SEQ ID NO: 5265 - DNA, 23 bp, synthetic construct
  misc_feature 1..23: note = Synthetic Polynucleotide
  source 1..23: mol_type = other DNA
ccagatcctattatrtaatggag

SEQ ID NO: 5266 - DNA, 23 bp, synthetic construct
  misc_feature 1..23: note = Synthetic Polynucleotide
  source 1..23: mol_type = other DNA
cccccaattacaggaarttggcc

SEQ ID NO: 5267 - DNA, 23 bp, synthetic construct
  misc_feature 1..23: note = Synthetic Polynucleotide
  source 1..23: mol_type = other DNA
ccgcgcagccccagctcarcgtg

SEQ ID NO: 5268 - DNA, 23 bp, synthetic construct
  misc_feature 1..23: note = Synthetic Polynucleotide
  source 1..23: mol_type = other DNA
ccggtaatttggtcarcacttac

SEQ ID NO: 5269 - DNA, 23 bp, synthetic construct
  misc_feature 1..23: note = Synthetic Polynucleotide
  source 1..23: mol_type = other DNA
ccattctccattccarcaacacc

SEQ ID NO: 5270 - DNA, 23 bp, synthetic construct
  misc_feature 1..23: note = Synthetic Polynucleotide
  source 1..23: mol_type = other DNA
ccatcggggaccctccaratgtc

SEQ ID NO: 5271 - DNA, 23 bp, synthetic construct
  misc_feature 1..23: note = Synthetic Polynucleotide
  source 1..23: mol_type = other DNA
cctggacttgagtatcarccaga

SEQ ID NO: 5272 - DNA, 23 bp, synthetic construct
  misc_feature 1..23: note = Synthetic Polynucleotide
  source 1..23: mol_type = other DNA
cctccaggagatggtracctgca

SEQ ID NO: 5273 - DNA, 23 bp, synthetic construct
  misc_feature 1..23: note = Synthetic Polynucleotide
  source 1..23: mol_type = other DNA
cccaagtgcctaagdtaaccctc

SEQ ID NO: 5274 - DNA, 23 bp, synthetic construct
  misc_feature 1..23: note = Synthetic Polynucleotide
  source 1..23: mol_type = other DNA
cccctttcttcccttcccrgggg

SEQ ID NO: 5275 - DNA, 23 bp, synthetic construct
  misc_feature 1..23: note = Synthetic Polynucleotide
  source 1..23: mol_type = other DNA
ccccattgtccacartccccaac

SEQ ID NO: 5276 - DNA, 23 bp, synthetic construct
  misc_feature 1..23: note = Synthetic Polynucleotide
  source 1..23: mol_type = other DNA
ccaggtctctggacactrtgggc

SEQ ID NO: 5277 - DNA, 23 bp, synthetic construct
  misc_feature 1..23: note = Synthetic Polynucleotide
  source 1..23: mol_type = other DNA
ccggcctggattttytttttttt

SEQ ID NO: 5278 - DNA, 23 bp, synthetic construct
  misc_feature 1..23: note = Synthetic Polynucleotide
  source 1..23: mol_type = other DNA
cctgggccctgcttatcartgaa

SEQ ID NO: 5279 - DNA, 23 bp, synthetic construct
  misc_feature 1..23: note = Synthetic Polynucleotide
  source 1..23: mol_type = other DNA
ccatgcaggaactcadttctcgg

SEQ ID NO: 5280 - DNA, 23 bp, synthetic construct
  misc_feature 1..23: note = Synthetic Polynucleotide
  source 1..23: mol_type = other DNA
ccctactgcgcctgctrcatgtc

SEQ ID NO: 5281 - DNA, 23 bp, synthetic construct
  misc_feature 1..23: note = Synthetic Polynucleotide
  source 1..23: mol_type = other DNA
cctactgcgcctgctrcatgtct

SEQ ID NO: 5282 - DNA, 23 bp, synthetic construct
  misc_feature 1..23: note = Synthetic Polynucleotide
  source 1..23: mol_type = other DNA
ccacttctacaccctcarccgcg

SEQ ID NO: 5283 - DNA, 23 bp, synthetic construct
  misc_feature 1..23: note = Synthetic Polynucleotide
  source 1..23: mol_type = other DNA
cctgtggtcatcgatarcttcca

SEQ ID NO: 5284 - DNA, 23 bp, synthetic construct
  misc_feature 1..23: note = Synthetic Polynucleotide
  source 1..23: mol_type = other DNA
cccttctggacatctrtacacac

SEQ ID NO: 5285 - DNA, 23 bp, synthetic construct
  misc_feature 1..23: note = Synthetic Polynucleotide
  source 1..23: mol_type = other DNA
ccttctggacatctrtacacact

SEQ ID NO: 5286 - DNA, 23 bp, synthetic construct
  misc_feature 1..23: note = Synthetic Polynucleotide
  source 1..23: mol_type = other DNA
ccaaacttaacggcaccrtaacc

SEQ ID NO: 5287 - DNA, 23 bp, synthetic construct
  misc_feature 1..23: note = Synthetic Polynucleotide
  source 1..23: mol_type = other DNA
ccattggcttttgtratatcatc

SEQ ID NO: 5288 - DNA, 23 bp, synthetic construct
  misc_feature 1..23: note = Synthetic Polynucleotide
  source 1..23: mol_type = other DNA
ccacttggctcaagaccartgga

SEQ ID NO: 5289 - DNA, 23 bp, synthetic construct
  misc_feature 1..23: note = Synthetic Polynucleotide
  source 1..23: mol_type = other DNA
cccaaaggcccgttaccrttggc

SEQ ID NO: 5290 - DNA, 23 bp, synthetic construct
  misc_feature 1..23: note = Synthetic Polynucleotide
  source 1..23: mol_type = other DNA
ccaaaggcccgttaccrttggct

SEQ ID NO: 5291 - DNA, 23 bp, synthetic construct
  misc_feature 1..23: note = Synthetic Polynucleotide
  source 1..23: mol_type = other DNA
ccccatcagaccatctacrgtga

SEQ ID NO: 5292 - DNA, 23 bp, synthetic construct
  misc_feature 1..23: note = Synthetic Polynucleotide
  source 1..23: mol_type = other DNA
cctgcaataacttcatctrtgga

SEQ ID NO: 5293 - DNA, 23 bp, synthetic construct
  misc_feature 1..23: note = Synthetic Polynucleotide
  source 1..23: mol_type = other DNA
ccgtggtcaccctgtaccrctgg

SEQ ID NO: 5294 - DNA, 23 bp, synthetic construct
  misc_feature 1..23: note = Synthetic Polynucleotide
  source 1..23: mol_type = other DNA
ccctgagcgccccatcrtatttc

SEQ ID NO: 5295 - DNA, 23 bp, synthetic construct
  misc_feature 1..23: note = Synthetic Polynucleotide
  source 1..23: mol_type = other DNA
cctgagcgccccatcrtatttct

SEQ ID NO: 5296 - DNA, 23 bp, synthetic construct
  misc_feature 1..23: note = Synthetic Polynucleotide
  source 1..23: mol_type = other DNA
ccactaggggaggccatdaggag

SEQ ID NO: 5297 - DNA, 23 bp, synthetic construct
  misc_feature 1..23: note = Synthetic Polynucleotide
  source 1..23: mol_type = other DNA
ccccaggggcctctrccacttct

SEQ ID NO: 5298 - DNA, 23 bp, synthetic construct
  misc_feature 1..23: note = Synthetic Polynucleotide
  source 1..23: mol_type = other DNA
cccaggggacaaagrtaccaaaa

SEQ ID NO: 5299 - DNA, 23 bp, synthetic construct
  misc_feature 1..23: note = Synthetic Polynucleotide
  source 1..23: mol_type = other DNA
cctggtgcagtgtgccadcgtgg

SEQ ID NO: 5300 - DNA, 23 bp, synthetic construct
  misc_feature 1..23: note = Synthetic Polynucleotide
  source 1..23: mol_type = other DNA
ccatgcctgtctacaaaraagct

SEQ ID NO: 5301 - DNA, 23 bp, synthetic construct
  misc_feature 1..23: note = Synthetic Polynucleotide
  source 1..23: mol_type = other DNA
ccactccagccactcrctctggc

SEQ ID NO: 5302 - DNA, 23 bp, synthetic construct
  misc_feature 1..23: note = Synthetic Polynucleotide
  source 1..23: mol_type = other DNA
cccctccctgtgtcttctrgctg

SEQ ID NO: 5303 - DNA, 23 bp, synthetic construct
  misc_feature 1..23: note = Synthetic Polynucleotide
  source 1..23: mol_type = other DNA
cctagaagaggatcrctacttag

SEQ ID NO: 5304 - DNA, 23 bp, synthetic construct
  misc_feature 1..23: note = Synthetic Polynucleotide
  source 1..23: mol_type = other DNA
ccagcaccagttcgtrttatgtg

SEQ ID NO: 5305 - DNA, 23 bp, synthetic construct
  misc_feature 1..23: note = Synthetic Polynucleotide
  source 1..23: mol_type = other DNA
ccccaatcctaagccctcrggag

SEQ ID NO: 5306 - DNA, 23 bp, synthetic construct
  misc_feature 1..23: note = Synthetic Polynucleotide
  source 1..23: mol_type = other DNA
cctccaacctgcggccctrgagc

SEQ ID NO: 5307 - DNA, 23 bp, synthetic construct
  misc_feature 1..23: note = Synthetic Polynucleotide
  source 1..23: mol_type = other DNA
cccgagaatcttccttacrgtac

SEQ ID NO: 5308 - DNA, 23 bp, synthetic construct
  misc_feature 1..23: note = Synthetic Polynucleotide
  source 1..23: mol_type = other DNA
ccgtcctgctgggccacracggt

SEQ ID NO: 5309 - DNA, 23 bp, synthetic construct
  misc_feature 1..23: note = Synthetic Polynucleotide
  source 1..23: mol_type = other DNA
ccccgctgatcatctaccrtgtc

SEQ ID NO: 5310 - DNA, 23 bp, synthetic construct
  misc_feature 1..23: note = Synthetic Polynucleotide
  source 1..23: mol_type = other DNA
cccgctgatcatctaccrtgtca

SEQ ID NO: 5311 - DNA, 23 bp, synthetic construct
  misc_feature 1..23: note = Synthetic Polynucleotide
  source 1..23: mol_type = other DNA
ccaccaggtggtggtartcttgg

SEQ ID NO: 5312 - DNA, 23 bp, synthetic construct
  misc_feature 1..23: note = Synthetic Polynucleotide
  source 1..23: mol_type = other DNA
cctggtttgatatgtrcctatct

SEQ ID NO: 5313 - DNA, 23 bp, synthetic construct
  misc_feature 1..23: note = Synthetic Polynucleotide
  source 1..23: mol_type = other DNA
cccaggacttcgtgtrccacctg

SEQ ID NO: 5314 - DNA, 23 bp, synthetic construct
  misc_feature 1..23: note = Synthetic Polynucleotide
  source 1..23: mol_type = other DNA
ccaggacttcgtgtrccacctgc

SEQ ID NO: 5315 - DNA, 23 bp, synthetic construct
  misc_feature 1..23: note = Synthetic Polynucleotide
  source 1..23: mol_type = other DNA
cctccttcctgggccacartgga

SEQ ID NO: 5316 - DNA, 23 bp, synthetic construct
  misc_feature 1..23: note = Synthetic Polynucleotide
  source 1..23: mol_type = other DNA
cccggtaatcgcataraacttaa

SEQ ID NO: 5317 - DNA, 23 bp, synthetic construct
  misc_feature 1..23: note = Synthetic Polynucleotide
  source 1..23: mol_type = other DNA
ccggtaatcgcataraacttaaa

SEQ ID NO: 5318 - DNA, 23 bp, synthetic construct
  misc_feature 1..23: note = Synthetic Polynucleotide
  source 1..23: mol_type = other DNA
ccctcaaacctaagaaatrtgtc

SEQ ID NO: 5319 - DNA, 23 bp, synthetic construct
  misc_feature 1..23: note = Synthetic Polynucleotide
  source 1..23: mol_type = other DNA
cctcaaacctaagaaatrtgtct

SEQ ID NO: 5320 - DNA, 23 bp, synthetic construct
  misc_feature 1..23: note = Synthetic Polynucleotide
  source 1..23: mol_type = other DNA
ccatcattccccctraataaatt

SEQ ID NO: 5321 - DNA, 23 bp, synthetic construct
  misc_feature 1..23: note = Synthetic Polynucleotide
  source 1..23: mol_type = other DNA
ccaagcttgttgcaartatgcta

SEQ ID NO: 5322 - DNA, 23 bp, synthetic construct
  misc_feature 1..23: note = Synthetic Polynucleotide
  source 1..23: mol_type = other DNA
cctggggccgtcgcacctrtgtc

SEQ ID NO: 5323 - DNA, 23 bp, synthetic construct
  misc_feature 1..23: note = Synthetic Polynucleotide
  source 1..23: mol_type = other DNA
ccctgctaccttcgtcarcagtg

SEQ ID NO: 5324 - DNA, 23 bp, synthetic construct
  misc_feature 1..23: note = Synthetic Polynucleotide
  source 1..23: mol_type = other DNA
cctgctaccttcgtcarcagtgc

SEQ ID NO: 5325 - DNA, 23 bp, synthetic construct
  misc_feature 1..23: note = Synthetic Polynucleotide
  source 1..23: mol_type = other DNA
ccctgagctcattaactrccatc

SEQ ID NO: 5326 - DNA, 23 bp, synthetic construct
  misc_feature 1..23: note = Synthetic Polynucleotide
  source 1..23: mol_type = other DNA
cctgagctcattaactrccatca

SEQ ID NO: 5327 - DNA, 23 bp, synthetic construct
  misc_feature 1..23: note = Synthetic Polynucleotide
  source 1..23: mol_type = other DNA
ccgagctccctgcgcraacacat

SEQ ID NO: 5328 - DNA, 23 bp, synthetic construct
  misc_feature 1..23: note = Synthetic Polynucleotide
  source 1..23: mol_type = other DNA
ccttcttgttactctrtttcaat

SEQ ID NO: 5329 - DNA, 23 bp, synthetic construct
  misc_feature 1..23: note = Synthetic Polynucleotide
  source 1..23: mol_type = other DNA
ccacagcggtcatctctrcctgc

SEQ ID NO: 5330 - DNA, 23 bp, synthetic construct
  misc_feature 1..23: note = Synthetic Polynucleotide
  source 1..23: mol_type = other DNA
ccgctctatgacttccrcctggc

SEQ ID NO: 5331 - DNA, 23 bp, synthetic construct
  misc_feature 1..23: note = Synthetic Polynucleotide
  source 1..23: mol_type = other DNA
cctggccacatgtgtcartgtgg

SEQ ID NO: 5332 - DNA, 23 bp, synthetic construct
  misc_feature 1..23: note = Synthetic Polynucleotide
  source 1..23: mol_type = other DNA
ccgcaggaatcctgtactrtgtc

SEQ ID NO: 5333 - DNA, 23 bp, synthetic construct
  misc_feature 1..23: note = Synthetic Polynucleotide
  source 1..23: mol_type = other DNA
ccagccgcttcctgcacrtgaag

SEQ ID NO: 5334 - DNA, 23 bp, synthetic construct
  misc_feature 1..23: note = Synthetic Polynucleotide
  source 1..23: mol_type = other DNA
cccacatccagtggatcragcac

SEQ ID NO: 5335 - DNA, 23 bp, synthetic construct
  misc_feature 1..23: note = Synthetic Polynucleotide
  source 1..23: mol_type = other DNA
ccgccctgctgagcccctrctcc

SEQ ID NO: 5336 - DNA, 23 bp, synthetic construct
  misc_feature 1..23: note = Synthetic Polynucleotide
  source 1..23: mol_type = other DNA
ccctgctgagcccctrctcctat

SEQ ID NO: 5337 - DNA, 23 bp, synthetic construct
  misc_feature 1..23: note = Synthetic Polynucleotide
  source 1..23: mol_type = other DNA
cctgctgagcccctrctcctatt

SEQ ID NO: 5338 - DNA, 23 bp, synthetic construct
  misc_feature 1..23: note = Synthetic Polynucleotide
  source 1..23: mol_type = other DNA
cccccgccgctacaccrttgccg

SEQ ID NO: 5339 - DNA, 23 bp, synthetic construct
  misc_feature 1..23: note = Synthetic Polynucleotide
  source 1..23: mol_type = other DNA
ccttctgctggccaacarcagcc

SEQ ID NO: 5340 - DNA, 23 bp, synthetic construct
  misc_feature 1..23: note = Synthetic Polynucleotide
  source 1..23: mol_type = other DNA
ccctcatgtctgaactcraagtc

SEQ ID NO: 5341 - DNA, 23 bp, synthetic construct
  misc_feature 1..23: note = Synthetic Polynucleotide
  source 1..23: mol_type = other DNA
cctcatgtctgaactcraagtcc

SEQ ID NO: 5342 - DNA, 23 bp, synthetic construct
  misc_feature 1..23: note = Synthetic Polynucleotide
  source 1..23: mol_type = other DNA
cctcatagatcttccrctatgcc

SEQ ID NO: 5343 - DNA, 23 bp, synthetic construct
  misc_feature 1..23: note = Synthetic Polynucleotide
  source 1..23: mol_type = other DNA
cctcatcttcaccgrtttcacct

SEQ ID NO: 5344 - DNA, 23 bp, synthetic construct
  misc_feature 1..23: note = Synthetic Polynucleotide
  source 1..23: mol_type = other DNA
ccgccgcctccggaacyaaacgg

SEQ ID NO: 5345 - DNA, 23 bp, synthetic construct
  misc_feature 1..23: note = Synthetic Polynucleotide
  source 1..23: mol_type = other DNA
ccaccatgcagaacctcvatgac

SEQ ID NO: 5346 - DNA, 23 bp, synthetic construct
  misc_feature 1..23: note = Synthetic Polynucleotide
  source 1..23: mol_type = other DNA
ccaccatgcagaacctcartgac

SEQ ID NO: 5347 - DNA, 23 bp, synthetic construct
  misc_feature 1..23: note = Synthetic Polynucleotide
  source 1..23: mol_type = other DNA
cctgcaggcgtctctccragtcg

SEQ ID NO: 5348 - DNA, 23 bp, synthetic construct
  misc_feature 1..23: note = Synthetic Polynucleotide
  source 1..23: mol_type = other DNA
ccccgagcgtgcgccctdccgcg

SEQ ID NO: 5349 - DNA, 23 bp, synthetic construct
  misc_feature 1..23: note = Synthetic Polynucleotide
  source 1..23: mol_type = other DNA
cccgagcgtgcgccctdccgcga

SEQ ID NO: 5350 - DNA, 23 bp, synthetic construct
  misc_feature 1..23: note = Synthetic Polynucleotide
  source 1..23: mol_type = other DNA
ccccactctaggtgtcctvtgtg

SEQ ID NO: 5351 - DNA, 23 bp, synthetic construct
  misc_feature 1..23: note = Synthetic Polynucleotide
  source 1..23: mol_type = other DNA
cccactctaggtgtcctvtgtga

SEQ ID NO: 5352 - DNA, 23 bp, synthetic construct
  misc_feature 1..23: note = Synthetic Polynucleotide
  source 1..23: mol_type = other DNA
ccgcaccccagtgcatccrcaga

SEQ ID NO: 5353 - DNA, 23 bp, synthetic construct
  misc_feature 1..23: note = Synthetic Polynucleotide
  source 1..23: mol_type = other DNA
cccctggggtcacctrttacttc

SEQ ID NO: 5354 - DNA, 23 bp, synthetic construct
  misc_feature 1..23: note = Synthetic Polynucleotide
  source 1..23: mol_type = other DNA
ccctggggtcacctrttacttca

SEQ ID NO: 5355 - DNA, 23 bp, synthetic construct
  misc_feature 1..23: note = Synthetic Polynucleotide
  source 1..23: mol_type = other DNA
ccgatggcccctactccarccct

SEQ ID NO: 5356 - DNA, 23 bp, synthetic construct
  misc_feature 1..23: note = Synthetic Polynucleotide
  source 1..23: mol_type = other DNA
cccctcacccaatctaccytgat

SEQ ID NO: 5357 - DNA, 23 bp, synthetic construct
  misc_feature 1..23: note = Synthetic Polynucleotide
  source 1..23: mol_type = other DNA
ccctcacccaatctaccytgatg

SEQ ID NO: 5358 - DNA, 23 bp, synthetic construct
  misc_feature 1..23: note = Synthetic Polynucleotide
  source 1..23: mol_type = other DNA
cccagaacatcacctrccactgc

SEQ ID NO: 5359 - DNA, 46 bp, synthetic construct
  misc_feature 1..46: note = Synthetic Polynucleotide
  source 1..46: mol_type = other DNA
cccagaacatcacctrccactgcccagaacatcacctrccactgca

SEQ ID NO: 5360 - DNA, 23 bp, synthetic construct
  misc_feature 1..23: note = Synthetic Polynucleotide
  source 1..23: mol_type = other DNA
ccattctggtgccactnccacag

SEQ ID NO: 5361 - DNA, 23 bp, synthetic construct
  misc_feature 1..23: note = Synthetic Polynucleotide
  source 1..23: mol_type = other DNA
ccctgaggtcagaccarcttcag

SEQ ID NO: 5362 - DNA, 23 bp, synthetic construct
  misc_feature 1..23: note = Synthetic Polynucleotide
  source 1..23: mol_type = other DNA
cctgaggtcagaccarcttcagc

SEQ ID NO: 5363 - DNA, 23 bp, synthetic construct
  misc_feature 1..23: note = Synthetic Polynucleotide
  source 1..23: mol_type = other DNA
ccagagcggccatcracaaatgg

SEQ ID NO: 5364 - DNA, 23 bp, synthetic construct
  misc_feature 1..23: note = Synthetic Polynucleotide
  source 1..23: mol_type = other DNA
cccagaacatcttcttcrtgagc

SEQ ID NO: 5365 - DNA, 23 bp, synthetic construct
  misc_feature 1..23: note = Synthetic Polynucleotide
  source 1..23: mol_type = other DNA
ccagcactatgatgccraaccac

SEQ ID NO: 5366 - DNA, 23 bp, synthetic construct
  misc_feature 1..23: note = Synthetic Polynucleotide
  source 1..23: mol_type = other DNA
cctcaatcccaaggccarccgcg

SEQ ID NO: 5367 - DNA, 23 bp, synthetic construct
  misc_feature 1..23: note = Synthetic Polynucleotide
  source 1..23: mol_type = other DNA
cctgtactcgctggtcracgcct

SEQ ID NO: 5368 - DNA, 23 bp, synthetic construct
  misc_feature 1..23: note = Synthetic Polynucleotide
  source 1..23: mol_type = other DNA
ccttcgacatcaccatcrtgatc

SEQ ID NO: 5369 - DNA, 23 bp, synthetic construct
  misc_feature 1..23: note = Synthetic Polynucleotide
  source 1..23: mol_type = other DNA
cctgttggcttaaacartaaaga

SEQ ID NO: 5370 - DNA, 23 bp, synthetic construct
  misc_feature 1..23: note = Synthetic Polynucleotide
  source 1..23: mol_type = other DNA
cctaagcacaatagcartagaca

SEQ ID NO: 5371 - DNA, 23 bp, synthetic construct
  misc_feature 1..23: note = Synthetic Polynucleotide
  source 1..23: mol_type = other DNA
cctgcatcctccaccttcrgggc

SEQ ID NO: 5372 - DNA, 23 bp, synthetic construct
  misc_feature 1..23: note = Synthetic Polynucleotide
  source 1..23: mol_type = other DNA
ccattgatggcttcttttrgggt

SEQ ID NO: 5373 - DNA, 23 bp, synthetic construct
  misc_feature 1..23: note = Synthetic Polynucleotide
  source 1..23: mol_type = other DNA
cctttctttatcttactcrggtg

SEQ ID NO: 5374 - DNA, 23 bp, synthetic construct
  misc_feature 1..23: note = Synthetic Polynucleotide
  source 1..23: mol_type = other DNA
ccagaaccttgacatctrtgaac

SEQ ID NO: 5375 - DNA, 23 bp, synthetic construct
  misc_feature 1..23: note = Synthetic Polynucleotide
  source 1..23: mol_type = other DNA
ccgctaccgtaaacacarcctct

SEQ ID NO: 5376 - DNA, 23 bp, synthetic construct
  misc_feature 1..23: note = Synthetic Polynucleotide
  source 1..23: mol_type = other DNA
cccgacctggtgtccccarggtg

SEQ ID NO: 5377 - DNA, 23 bp, synthetic construct
  misc_feature 1..23: note = Synthetic Polynucleotide
  source 1..23: mol_type = other DNA
cccggcgccgcaagctctrctgc

SEQ ID NO: 5378 - DNA, 23 bp, synthetic construct
  misc_feature 1..23: note = Synthetic Polynucleotide
  source 1..23: mol_type = other DNA
ccggcgccgcaagctctrctgcg

SEQ ID NO: 5379 - DNA, 23 bp, synthetic construct
  misc_feature 1..23: note = Synthetic Polynucleotide
  source 1..23: mol_type = other DNA
cccgaaggctacagatrtaatct

SEQ ID NO: 5380 - DNA, 23 bp, synthetic construct
  misc_feature 1..23: note = Synthetic Polynucleotide
  source 1..23: mol_type = other DNA
ccgaaggctacagatrtaatctc

SEQ ID NO: 5381 - DNA, 23 bp, synthetic construct
  misc_feature 1..23: note = Synthetic Polynucleotide
  source 1..23: mol_type = other DNA
cctctgtacaaaagacartttta

SEQ ID NO: 5382 - DNA, 23 bp, synthetic construct
  misc_feature 1..23: note = Synthetic Polynucleotide
  source 1..23: mol_type = other DNA
cctcctcaaagcaatacrctgaa

SEQ ID NO: 5383 - DNA, 23 bp, synthetic construct
  misc_feature 1..23: note = Synthetic Polynucleotide
  source 1..23: mol_type = other DNA
ccaatcaggtaatctrcttgaat

SEQ ID NO: 5384 - DNA, 23 bp, synthetic construct
  misc_feature 1..23: note = Synthetic Polynucleotide
  source 1..23: mol_type = other DNA
ccttccctccaggctvcttgtac

SEQ ID NO: 5385 - DNA, 23 bp, synthetic construct
  misc_feature 1..23: note = Synthetic Polynucleotide
  source 1..23: mol_type = other DNA
ccatcatcctggagracttcagt

SEQ ID NO: 5386 - DNA, 23 bp, synthetic construct
  misc_feature 1..23: note = Synthetic Polynucleotide
  source 1..23: mol_type = other DNA
ccaaacacttctctrtaatcttt

SEQ ID NO: 5387 - DNA, 23 bp, synthetic construct
  misc_feature 1..23: note = Synthetic Polynucleotide
  source 1..23: mol_type = other DNA
ccacctggcagaaaatctrcttc

SEQ ID NO: 5388 - DNA, 23 bp, synthetic construct
  misc_feature 1..23: note = Synthetic Polynucleotide
  source 1..23: mol_type = other DNA
cctggcagaaaatctrcttctac

SEQ ID NO: 5389 - DNA, 23 bp, synthetic construct
  misc_feature 1..23: note = Synthetic Polynucleotide
  source 1..23: mol_type = other DNA
ccctcaaaggttcarcatacaaa

SEQ ID NO: 5390 - DNA, 23 bp, synthetic construct
  misc_feature 1..23: note = Synthetic Polynucleotide
  source 1..23: mol_type = other DNA
ccctcagcatctcccttcrtgtc

SEQ ID NO: 5391 - DNA, 23 bp, synthetic construct
  misc_feature 1..23: note = Synthetic Polynucleotide
  source 1..23: mol_type = other DNA
cctcagcatctcccttcrtgtct

SEQ ID NO: 5392 - DNA, 23 bp, synthetic construct
  misc_feature 1..23: note = Synthetic Polynucleotide
  source 1..23: mol_type = other DNA
ccaccgtggacacctyctttgcc

SEQ ID NO: 5393 - DNA, 23 bp, synthetic construct
  misc_feature 1..23: note = Synthetic Polynucleotide
  source 1..23: mol_type = other DNA
cccctttgcagagaracactgca

SEQ ID NO: 5394 - DNA, 23 bp, synthetic construct
  misc_feature 1..23: note = Synthetic Polynucleotide
  source 1..23: mol_type = other DNA
cccctcaagcaccaacacrtttt

SEQ ID NO: 5395 - DNA, 23 bp, synthetic construct
  misc_feature 1..23: note = Synthetic Polynucleotide
  source 1..23: mol_type = other DNA
ccctcaagcaccaacacrttttc

SEQ ID NO: 5396 - DNA, 23 bp, synthetic construct
  misc_feature 1..23: note = Synthetic Polynucleotide
  source 1..23: mol_type = other DNA
cctcaagcaccaacacrttttct

SEQ ID NO: 5397 - DNA, 23 bp, synthetic construct
  misc_feature 1..23: note = Synthetic Polynucleotide
  source 1..23: mol_type = other DNA
cctgcagtgctttccctcrgtgc

SEQ ID NO: 5398 - DNA, 23 bp, synthetic construct
  misc_feature 1..23: note = Synthetic Polynucleotide
  source 1..23: mol_type = other DNA
ccagcgagcgggagraactgcgc

SEQ ID NO: 5399 - DNA, 23 bp, synthetic construct
  misc_feature 1..23: note = Synthetic Polynucleotide
  source 1..23: mol_type = other DNA
ccataaggagcgccccrcagtca

SEQ ID NO: 5400 - DNA, 23 bp, synthetic construct
  misc_feature 1..23: note = Synthetic Polynucleotide
  source 1..23: mol_type = other DNA
cctgatcatcttcacctrctaca

SEQ ID NO: 5401 - DNA, 23 bp, synthetic construct
  misc_feature 1..23: note = Synthetic Polynucleotide
  source 1..23: mol_type = other DNA
ccattgtcatacacarcctagac

SEQ ID NO: 5402 - DNA, 23 bp, synthetic construct
  misc_feature 1..23: note = Synthetic Polynucleotide
  source 1..23: mol_type = other DNA
ccacaaaagaaattrcaaatgga

SEQ ID NO: 5403 - DNA, 23 bp, synthetic construct
  misc_feature 1..23: note = Synthetic Polynucleotide
  source 1..23: mol_type = other DNA
cctgcctgcttcatcrcacagct

SEQ ID NO: 5404 - DNA, 23 bp, synthetic construct
  misc_feature 1..23: note = Synthetic Polynucleotide
  source 1..23: mol_type = other DNA
ccctgagggacagttcrttgata

SEQ ID NO: 5405 - DNA, 23 bp, synthetic construct
  misc_feature 1..23: note = Synthetic Polynucleotide
  source 1..23: mol_type = other DNA
cccacgggtacaacrttaccgag

SEQ ID NO: 5406 - DNA, 23 bp, synthetic construct
  misc_feature 1..23: note = Synthetic Polynucleotide
  source 1..23: mol_type = other DNA
ccgagtctgttgcactaytgggg

SEQ ID NO: 5407 - DNA, 23 bp, synthetic construct
  misc_feature 1..23: note = Synthetic Polynucleotide
  source 1..23: mol_type = other DNA
ccagctgcccttccccarccacg

SEQ ID NO: 5408 - DNA, 23 bp, synthetic construct
  misc_feature 1..23: note = Synthetic Polynucleotide
  source 1..23: mol_type = other DNA
cctgagtagaccatrtccttaaa

SEQ ID NO: 5409 - DNA, 23 bp, synthetic construct
  misc_feature 1..23: note = Synthetic Polynucleotide
  source 1..23: mol_type = other DNA
ccctccagcaccttcaycaggaa

SEQ ID NO: 5410 - DNA, 23 bp, synthetic construct
  misc_feature 1..23: note = Synthetic Polynucleotide
  source 1..23: mol_type = other DNA
ccaaaaggaggctgaaratcagc

SEQ ID NO: 5411 - DNA, 23 bp, synthetic construct
  misc_feature 1..23: note = Synthetic Polynucleotide
  source 1..23: mol_type = other DNA
ccagggccgcgtctrcaacttcc

SEQ ID NO: 5412 - DNA, 23 bp, synthetic construct
  misc_feature 1..23: note = Synthetic Polynucleotide
  source 1..23: mol_type = other DNA
ccagcgcccgagagaccrtgcag

SEQ ID NO: 5413 - DNA, 23 bp, synthetic construct
  misc_feature 1..23: note = Synthetic Polynucleotide
  source 1..23: mol_type = other DNA
ccacaaagtgtgaccrcatattt

SEQ ID NO: 5414 - DNA, 23 bp, synthetic construct
  misc_feature 1..23: note = Synthetic Polynucleotide
  source 1..23: mol_type = other DNA
ccttccatttatctttctrggtc

SEQ ID NO: 5415 - DNA, 23 bp, synthetic construct
  misc_feature 1..23: note = Synthetic Polynucleotide
  source 1..23: mol_type = other DNA
ccaccttatcgagcrctcaaggc

SEQ ID NO: 5416 - DNA, 23 bp, synthetic construct
  misc_feature 1..23: note = Synthetic Polynucleotide
  source 1..23: mol_type = other DNA
cctgcagagcttggactrtgaca

SEQ ID NO: 5417 - DNA, 23 bp, synthetic construct
  misc_feature 1..23: note = Synthetic Polynucleotide
  source 1..23: mol_type = other DNA
cccgccgcagcagcttcayggcg

SEQ ID NO: 5418 - DNA, 23 bp, synthetic construct
  misc_feature 1..23: note = Synthetic Polynucleotide
  source 1..23: mol_type = other DNA
ccgagagagatggaataargccc

SEQ ID NO: 5419 - DNA, 23 bp, synthetic construct
  misc_feature 1..23: note = Synthetic Polynucleotide
  source 1..23: mol_type = other DNA
ccacctctcaaaggrccctgaga

SEQ ID NO: 5420 - DNA, 23 bp, synthetic construct
  misc_feature 1..23: note = Synthetic Polynucleotide
  source 1..23: mol_type = other DNA
ccgtggtggccttcracttcttc

SEQ ID NO: 5421 - DNA, 23 bp, synthetic construct
  misc_feature 1..23: note = Synthetic Polynucleotide
  source 1..23: mol_type = other DNA
ccgcatcgccgtccactncttca

SEQ ID NO: 5422 - DNA, 23 bp, synthetic construct
  misc_feature 1..23: note = Synthetic Polynucleotide
  source 1..23: mol_type = other DNA
ccgggccctgaaaactrtatcag

SEQ ID NO: 5423 - DNA, 23 bp, synthetic construct
  misc_feature 1..23: note = Synthetic Polynucleotide
  source 1..23: mol_type = other DNA
cccattgttttctcatacrggtt

SEQ ID NO: 5424 - DNA, 23 bp, synthetic construct
  misc_feature 1..23: note = Synthetic Polynucleotide
  source 1..23: mol_type = other DNA
ccttcttgccaaccaaccrtgag

SEQ ID NO: 5425 - DNA, 23 bp, synthetic construct
  misc_feature 1..23: note = Synthetic Polynucleotide
  source 1..23: mol_type = other DNA
ccctgctgacagattrctcacct

SEQ ID NO: 5426 - DNA, 23 bp, synthetic construct
  misc_feature 1..23: note = Synthetic Polynucleotide
  source 1..23: mol_type = other DNA
cctgctgacagattrctcacctc

SEQ ID NO: 5427 - DNA, 23 bp, synthetic construct
  misc_feature 1..23: note = Synthetic Polynucleotide
  source 1..23: mol_type = other DNA
ccacacaagatattcdtttgggt

SEQ ID NO: 5428 - DNA, 23 bp, synthetic construct
  misc_feature 1..23: note = Synthetic Polynucleotide
  source 1..23: mol_type = other DNA
ccagatcctggctgdttacctca

SEQ ID NO: 5429 - DNA, 23 bp, synthetic construct
  misc_feature 1..23: note = Synthetic Polynucleotide
  source 1..23: mol_type = other DNA
ccagatcctggctgattrcctca

SEQ ID NO: 5430 - DNA, 23 bp, synthetic construct
  misc_feature 1..23: note = Synthetic Polynucleotide
  source 1..23: mol_type = other DNA
ccgtgccttttaggracactata

SEQ ID NO: 5431 - DNA, 23 bp, synthetic construct
  misc_feature 1..23: note = Synthetic Polynucleotide
  source 1..23: mol_type = other DNA
ccccagacttcggccccrtgcgg

SEQ ID NO: 5432 - DNA, 23 bp, synthetic construct
  misc_feature 1..23: note = Synthetic Polynucleotide
  source 1..23: mol_type = other DNA
cccagaagccattgraatctacc

SEQ ID NO: 5433 - DNA, 23 bp, synthetic construct
  misc_feature 1..23: note = Synthetic Polynucleotide
  source 1..23: mol_type = other DNA
cctgagaagaaaactcctyctac

SEQ ID NO: 5434 - DNA, 23 bp, synthetic construct
  misc_feature 1..23: note = Synthetic Polynucleotide
  source 1..23: mol_type = other DNA
cccattcaacgtctdcatcgagt

SEQ ID NO: 5435 - DNA, 23 bp, synthetic construct
  misc_feature 1..23: note = Synthetic Polynucleotide
  source 1..23: mol_type = other DNA
ccgactaccccgactrcaagtac

SEQ ID NO: 5436 - DNA, 23 bp, synthetic construct
  misc_feature 1..23: note = Synthetic Polynucleotide
  source 1..23: mol_type = other DNA
ccaagcttgttgcaaatrtgcta

SEQ ID NO: 5437 - DNA, 23 bp, synthetic construct
  misc_feature 1..23: note = Synthetic Polynucleotide
  source 1..23: mol_type = other DNA
cctgcttctgtctcctacrgcca

SEQ ID NO: 5438 - DNA, 23 bp, synthetic construct
  misc_feature 1..23: note = Synthetic Polynucleotide
  source 1..23: mol_type = other DNA
ccgtcttcaccgtcttcrtgcta

SEQ ID NO: 5439 - DNA, 23 bp, synthetic construct
  misc_feature 1..23: note = Synthetic Polynucleotide
  source 1..23: mol_type = other DNA
ccacaatgatgtcctaaractgt

SEQ ID NO: 5440 - DNA, 23 bp, synthetic construct
  misc_feature 1..23: note = Synthetic Polynucleotide
  source 1..23: mol_type = other DNA
ccaccttcatagccaacaytgtc

SEQ ID NO: 5441 - DNA, 23 bp, synthetic construct
  misc_feature 1..23: note = Synthetic Polynucleotide
  source 1..23: mol_type = other DNA
ccaacattgatgagatctrtaag

SEQ ID NO: 5442 - DNA, 23 bp, synthetic construct
  misc_feature 1..23: note = Synthetic Polynucleotide
  source 1..23: mol_type = other DNA
ccaaactgaagcgctcctdctcc

SEQ ID NO: 5443 - DNA, 23 bp, synthetic construct
  misc_feature 1..23: note = Synthetic Polynucleotide
  source 1..23: mol_type = other DNA
ccgctgccccccttcccarggct

SEQ ID NO: 5444 - DNA, 23 bp, synthetic construct
  misc_feature 1..23: note = Synthetic Polynucleotide
  source 1..23: mol_type = other DNA
cccttctctgctggccccrggaa

SEQ ID NO: 5445 - DNA, 23 bp, synthetic construct
  misc_feature 1..23: note = Synthetic Polynucleotide
  source 1..23: mol_type = other DNA
ccatccactacaactacrtgtgt

SEQ ID NO: 5446 - DNA, 23 bp, synthetic construct
  misc_feature 1..23: note = Synthetic Polynucleotide
  source 1..23: mol_type = other DNA
cctctcctctgcagractatgaa

SEQ ID NO: 5447 - DNA, 23 bp, synthetic construct
  misc_feature 1..23: note = Synthetic Polynucleotide
  source 1..23: mol_type = other DNA
cctttctttttttttcaargcga

SEQ ID NO: 5448 - DNA, 23 bp, synthetic construct
  misc_feature 1..23: note = Synthetic Polynucleotide
  source 1..23: mol_type = other DNA
cctgggaggagatacacrtttcg

SEQ ID NO: 5449 - DNA, 23 bp, synthetic construct
  misc_feature 1..23: note = Synthetic Polynucleotide
  source 1..23: mol_type = other DNA
cctaaaactgtgtgrctttggta

SEQ ID NO: 5450 - DNA, 23 bp, synthetic construct
  misc_feature 1..23: note = Synthetic Polynucleotide
  source 1..23: mol_type = other DNA
cctatcaccattgcrctttatta

SEQ ID NO: 5451 - DNA, 23 bp, synthetic construct
  misc_feature 1..23: note = Synthetic Polynucleotide
  source 1..23: mol_type = other DNA
ccacttggaccaccaccrcctcg

SEQ ID NO: 5452 - DNA, 23 bp, synthetic construct
  misc_feature 1..23: note = Synthetic Polynucleotide
  source 1..23: mol_type = other DNA
ccagtctttaccaccyaaaaaac

SEQ ID NO: 5453 - DNA, 23 bp, synthetic construct
  misc_feature 1..23: note = Synthetic Polynucleotide
  source 1..23: mol_type = other DNA
cctgtgagtggcctctttrtatg

SEQ ID NO: 5454 - DNA, 23 bp, synthetic construct
  misc_feature 1..23: note = Synthetic Polynucleotide
  source 1..23: mol_type = other DNA
cctggagatcaccttcancctgc

SEQ ID NO: 5455 - DNA, 23 bp, synthetic construct
  misc_feature 1..23: note = Synthetic Polynucleotide
  source 1..23: mol_type = other DNA
cctgcactccacagrcctcatcg

SEQ ID NO: 5456 - DNA, 23 bp, synthetic construct
  misc_feature 1..23: note = Synthetic Polynucleotide
  source 1..23: mol_type = other DNA
ccttgttggcagctaacracttg

SEQ ID NO: 5457 - DNA, 23 bp, synthetic construct
  misc_feature 1..23: note = Synthetic Polynucleotide
  source 1..23: mol_type = other DNA
ccttgacgatattctrctttatt

SEQ ID NO: 5458 - DNA, 23 bp, synthetic construct
  misc_feature 1..23: note = Synthetic Polynucleotide
  source 1..23: mol_type = other DNA
ccgtgagcatgccaraatcttca

SEQ ID NO: 5459 - DNA, 23 bp, synthetic construct
  misc_feature 1..23: note = Synthetic Polynucleotide
  source 1..23: mol_type = other DNA
cctgttctcgctcatcartgggg

SEQ ID NO: 5460 - DNA, 23 bp, synthetic construct
  misc_feature 1..23: note = Synthetic Polynucleotide
  source 1..23: mol_type = other DNA
cccatccttttccttcccrgggc

SEQ ID NO: 5461 - DNA, 23 bp, synthetic construct
  misc_feature 1..23: note = Synthetic Polynucleotide
  source 1..23: mol_type = other DNA
cctcttcgtgcaatrtatcatca

SEQ ID NO: 5462 - DNA, 23 bp, synthetic construct
  misc_feature 1..23: note = Synthetic Polynucleotide
  source 1..23: mol_type = other DNA
cctctgcttttgctctatrgtta

SEQ ID NO: 5463 - DNA, 23 bp, synthetic construct
  misc_feature 1..23: note = Synthetic Polynucleotide
  source 1..23: mol_type = other DNA
ccctgctctgtgcctcacrgaac

SEQ ID NO: 5464 - DNA, 23 bp, synthetic construct
  misc_feature 1..23: note = Synthetic Polynucleotide
  source 1..23: mol_type = other DNA
cccacccgctagttgtcavcatg

SEQ ID NO: 5465 - DNA, 23 bp, synthetic construct
  misc_feature 1..23: note = Synthetic Polynucleotide
  source 1..23: mol_type = other DNA
ccacccgctagttgtcavcatgt

SEQ ID NO: 5466 - DNA, 23 bp, synthetic construct
  misc_feature 1..23: note = Synthetic Polynucleotide
  source 1..23: mol_type = other DNA
cccgctagttgtcavcatgtact

SEQ ID NO: 5467 - DNA, 23 bp, synthetic construct
  misc_feature 1..23: note = Synthetic Polynucleotide
  source 1..23: mol_type = other DNA
cccccatcccgcaggaccragtt

SEQ ID NO: 5468 - DNA, 23 bp, synthetic construct
  misc_feature 1..23: note = Synthetic Polynucleotide
  source 1..23: mol_type = other DNA
ccccatcccgcaggaccragttc

SEQ ID NO: 5469 - DNA, 23 bp, synthetic construct
  misc_feature 1..23: note = Synthetic Polynucleotide
  source 1..23: mol_type = other DNA
cccatcccgcaggaccragttcc

SEQ ID NO: 5470 - DNA, 23 bp, synthetic construct
  misc_feature 1..23: note = Synthetic Polynucleotide
  source 1..23: mol_type = other DNA
ccatcccgcaggaccragttcct

SEQ ID NO: 5471 - DNA, 23 bp, synthetic construct
  misc_feature 1..23: note = Synthetic Polynucleotide
  source 1..23: mol_type = other DNA
ccaaaacgtgccagaactrtgac

SEQ ID NO: 5472 - DNA, 23 bp, synthetic construct
  misc_feature 1..23: note = Synthetic Polynucleotide
  source 1..23: mol_type = other DNA
cctgtgtgggaattacartggca

SEQ ID NO: 5473 - DNA, 23 bp, synthetic construct
  misc_feature 1..23: note = Synthetic Polynucleotide
  source 1..23: mol_type = other DNA
ccagatcctattatrtaatggag

SEQ ID NO: 5474 - DNA, 23 bp, synthetic construct
  misc_feature 1..23: note = Synthetic Polynucleotide
  source 1..23: mol_type = other DNA
cccccaattacaggaarttggcc

SEQ ID NO: 5475 - DNA, 23 bp, synthetic construct
  misc_feature 1..23: note = Synthetic Polynucleotide
  source 1..23: mol_type = other DNA
ccccaattacaggaarttggcct

SEQ ID NO: 5476 - DNA, 23 bp, synthetic construct
  misc_feature 1..23: note = Synthetic Polynucleotide
  source 1..23: mol_type = other DNA
cccaattacaggaarttggcctt

SEQ ID NO: 5477 - DNA, 23 bp, synthetic construct
  misc_feature 1..23: note = Synthetic Polynucleotide
  source 1..23: mol_type = other DNA
ccgcgcagccccagctcarcgtg

SEQ ID NO: 5478 - DNA, 23 bp, synthetic construct
  misc_feature 1..23: note = Synthetic Polynucleotide
  source 1..23: mol_type = other DNA
ccggtaatttggtcarcacttac

SEQ ID NO: 5479 - DNA, 23 bp, synthetic construct
  misc_feature 1..23: note = Synthetic Polynucleotide
  source 1..23: mol_type = other DNA
ccattctccattccarcaacacc

SEQ ID NO: 5480 - DNA, 23 bp, synthetic construct
  misc_feature 1..23: note = Synthetic Polynucleotide
  source 1..23: mol_type = other DNA
ccatcggggaccctccaratgtc

SEQ ID NO: 5481 - DNA, 23 bp, synthetic construct
  misc_feature 1..23: note = Synthetic Polynucleotide
  source 1..23: mol_type = other DNA
cctggacttgagtatcarccaga

SEQ ID NO: 5482 - DNA, 23 bp, synthetic construct
  misc_feature 1..23: note = Synthetic Polynucleotide
  source 1..23: mol_type = other DNA
ccctccaggagatggtracctgc

SEQ ID NO: 5483 - DNA, 23 bp, synthetic construct
  misc_feature 1..23: note = Synthetic Polynucleotide
  source 1..23: mol_type = other DNA
cctccaggagatggtracctgca

SEQ ID NO: 5484 - DNA, 23 bp, synthetic construct
  misc_feature 1..23: note = Synthetic Polynucleotide
  source 1..23: mol_type = other DNA
cccctttcttcccttcccrgggg

SEQ ID NO: 5485 - DNA, 23 bp, synthetic construct
  misc_feature 1..23: note = Synthetic Polynucleotide
  source 1..23: mol_type = other DNA
ccctttcttcccttcccrggggc

SEQ ID NO: 5486 - DNA, 23 bp, synthetic construct
  misc_feature 1..23: note = Synthetic Polynucleotide
  source 1..23: mol_type = other DNA
cctttcttcccttcccrggggct

SEQ ID NO: 5487 - DNA, 23 bp, synthetic construct
  misc_feature 1..23: note = Synthetic Polynucleotide
  source 1..23: mol_type = other DNA
cctttcttcccttcccrggggct

SEQ ID NO: 5488 - DNA, 23 bp, synthetic construct
  misc_feature 1..23: note = Synthetic Polynucleotide
  source 1..23: mol_type = other DNA
ccccattgtccacartccccaac

SEQ ID NO: 5489 - DNA, 23 bp, synthetic construct
  misc_feature 1..23: note = Synthetic Polynucleotide
  source 1..23: mol_type = other DNA
ccaggtctctggacactrtgggc

SEQ ID NO: 5490 - DNA, 23 bp, synthetic construct
  misc_feature 1..23: note = Synthetic Polynucleotide
  source 1..23: mol_type = other DNA
ccggcctggattttytttttttt

SEQ ID NO: 5491 - DNA, 23 bp, synthetic construct
  misc_feature 1..23: note = Synthetic Polynucleotide
  source 1..23: mol_type = other DNA
cctgggccctgcttatcartgaa

SEQ ID NO: 5492 - DNA, 23 bp, synthetic construct
  misc_feature 1..23: note = Synthetic Polynucleotide
  source 1..23: mol_type = other DNA
ccatgcaggaactcadttctcgg

SEQ ID NO: 5493 - DNA, 23 bp, synthetic construct
  misc_feature 1..23: note = Synthetic Polynucleotide
  source 1..23: mol_type = other DNA
cccctactgcgcctgctrcatgt

SEQ ID NO: 5494 - DNA, 23 bp, synthetic construct
  misc_feature 1..23: note = Synthetic Polynucleotide
  source 1..23: mol_type = other DNA
ccctactgcgcctgctrcatgtc

SEQ ID NO: 5495 - DNA, 23 bp, synthetic construct
  misc_feature 1..23: note = Synthetic Polynucleotide
  source 1..23: mol_type = other DNA
cctactgcgcctgctrcatgtct

SEQ ID NO: 5496 - DNA, 23 bp, synthetic construct
  misc_feature 1..23: note = Synthetic Polynucleotide
  source 1..23: mol_type = other DNA
ccacttctacaccctcarccgcg

SEQ ID NO: 5497 - DNA, 23 bp, synthetic construct
  misc_feature 1..23: note = Synthetic Polynucleotide
  source 1..23: mol_type = other DNA
cctgtggtcatcgatarcttcca

SEQ ID NO: 5498 - DNA, 23 bp, synthetic construct
  misc_feature 1..23: note = Synthetic Polynucleotide
  source 1..23: mol_type = other DNA
cccttctggacatctrtacacac

SEQ ID NO: 5499 - DNA, 23 bp, synthetic construct
  misc_feature 1..23: note = Synthetic Polynucleotide
  source 1..23: mol_type = other DNA
ccttctggacatctrtacacact

SEQ ID NO: 5500 - DNA, 23 bp, synthetic construct
  misc_feature 1..23: note = Synthetic Polynucleotide
  source 1..23: mol_type = other DNA
ccaaacttaacggcaccrtaacc

SEQ ID NO: 5501 - DNA, 23 bp, synthetic construct
  misc_feature 1..23: note = Synthetic Polynucleotide
  source 1..23: mol_type = other DNA
ccattggcttttgtratatcatc

SEQ ID NO: 5502 - DNA, 23 bp, synthetic construct
  misc_feature 1..23: note = Synthetic Polynucleotide
  source 1..23: mol_type = other DNA
ccacttggctcaagaccartgga

SEQ ID NO: 5503 - DNA, 23 bp, synthetic construct
  misc_feature 1..23: note = Synthetic Polynucleotide
  source 1..23: mol_type = other DNA
cccaaaggcccgttaccrttggc

SEQ ID NO: 5504 - DNA, 23 bp, synthetic construct
  misc_feature 1..23: note = Synthetic Polynucleotide
  source 1..23: mol_type = other DNA
ccaaaggcccgttaccrttggct

SEQ ID NO: 5505 - DNA, 23 bp, synthetic construct
  misc_feature 1..23: note = Synthetic Polynucleotide
  source 1..23: mol_type = other DNA
ccccatcagaccatctacrgtga

SEQ ID NO: 5506 - DNA, 23 bp, synthetic construct
  misc_feature 1..23: note = Synthetic Polynucleotide
  source 1..23: mol_type = other DNA
cccatcagaccatctacrgtgag

SEQ ID NO: 5507 - DNA, 23 bp, synthetic construct
  misc_feature 1..23: note = Synthetic Polynucleotide
  source 1..23: mol_type = other DNA
ccatcagaccatctacrgtgagt

SEQ ID NO: 5508 - DNA, 23 bp, synthetic construct
  misc_feature 1..23: note = Synthetic Polynucleotide
  source 1..23: mol_type = other DNA
cctgcaataacttcatctrtgga

SEQ ID NO: 5509 - DNA, 23 bp, synthetic construct
  misc_feature 1..23: note = Synthetic Polynucleotide
  source 1..23: mol_type = other DNA
ccgtggtcaccctgtaccrctgg

SEQ ID NO: 5510 - DNA, 23 bp, synthetic construct
  misc_feature 1..23: note = Synthetic Polynucleotide
  source 1..23: mol_type = other DNA
ccctgagcgccccatcrtatttc

SEQ ID NO: 5511 - DNA, 23 bp, synthetic construct
  misc_feature 1..23: note = Synthetic Polynucleotide
  source 1..23: mol_type = other DNA
cctgagcgccccatcrtatttct

SEQ ID NO: 5512 - DNA, 23 bp, synthetic construct
  misc_feature 1..23: note = Synthetic Polynucleotide
  source 1..23: mol_type = other DNA
ccactaggggaggccatdaggag

SEQ ID NO: 5513 - DNA, 23 bp, synthetic construct
  misc_feature 1..23: note = Synthetic Polynucleotide
  source 1..23: mol_type = other DNA
ccccaggggcctctrccacttct

SEQ ID NO: 5514 - DNA, 23 bp, synthetic construct
  misc_feature 1..23: note = Synthetic Polynucleotide
  source 1..23: mol_type = other DNA
cccaggggacaaagrtaccaaaa

SEQ ID NO: 5515 - DNA, 23 bp, synthetic construct
  misc_feature 1..23: note = Synthetic Polynucleotide
  source 1..23: mol_type = other DNA
cctggtgcagtgtgccadcgtgg

SEQ ID NO: 5516 - DNA, 23 bp, synthetic construct
  misc_feature 1..23: note = Synthetic Polynucleotide
  source 1..23: mol_type = other DNA
ccatgcctgtctacaaaraagct

SEQ ID NO: 5517 - DNA, 23 bp, synthetic construct
  misc_feature 1..23: note = Synthetic Polynucleotide
  source 1..23: mol_type = other DNA
ccactccagccactcrctctggc

SEQ ID NO: 5518 - DNA, 23 bp, synthetic construct
  misc_feature 1..23: note = Synthetic Polynucleotide
  source 1..23: mol_type = other DNA
cccctccctgtgtcttctrgctg

SEQ ID NO: 5519 - DNA, 23 bp, synthetic construct
  misc_feature 1..23: note = Synthetic Polynucleotide
  source 1..23: mol_type = other DNA
ccctccctgtgtcttctrgctgt

SEQ ID NO: 5520 - DNA, 23 bp, synthetic construct
  misc_feature 1..23: note = Synthetic Polynucleotide
  source 1..23: mol_type = other DNA
cctccctgtgtcttctrgctgtg

SEQ ID NO: 5521 - DNA, 23 bp, synthetic construct
  misc_feature 1..23: note = Synthetic Polynucleotide
  source 1..23: mol_type = other DNA
cctagaagaggatcrctacttag

SEQ ID NO: 5522 - DNA, 23 bp, synthetic construct
  misc_feature 1..23: note = Synthetic Polynucleotide
  source 1..23: mol_type = other DNA
ccagcaccagttcgtrttatgtg

SEQ ID NO: 5523 - DNA, 23 bp, synthetic construct
  misc_feature 1..23: note = Synthetic Polynucleotide
  source 1..23: mol_type = other DNA
ccccaatcctaagccctcrggag

SEQ ID NO: 5524 - DNA, 23 bp, synthetic construct
  misc_feature 1..23: note = Synthetic Polynucleotide
  source 1..23: mol_type = other DNA
cccaatcctaagccctcrggagg

SEQ ID NO: 5525 - DNA, 23 bp, synthetic construct
  misc_feature 1..23: note = Synthetic Polynucleotide
  source 1..23: mol_type = other DNA
ccaatcctaagccctcrggaggt

SEQ ID NO: 5526 - DNA, 23 bp, synthetic construct
  misc_feature 1..23: note = Synthetic Polynucleotide
  source 1..23: mol_type = other DNA
cctccaacctgcggccctrgagc

SEQ ID NO: 5527 - DNA, 23 bp, synthetic construct
  misc_feature 1..23: note = Synthetic Polynucleotide
  source 1..23: mol_type = other DNA
ccaacctgcggccctrgagcgcc

SEQ ID NO: 5528 - DNA, 23 bp, synthetic construct
  misc_feature 1..23: note = Synthetic Polynucleotide
  source 1..23: mol_type = other DNA
cccgagaatcttccttacrgtac

SEQ ID NO: 5529 - DNA, 23 bp, synthetic construct
  misc_feature 1..23: note = Synthetic Polynucleotide
  source 1..23: mol_type = other DNA
ccgagaatcttccttacrgtacc

SEQ ID NO: 5530 - DNA, 23 bp, synthetic construct
  misc_feature 1..23: note = Synthetic Polynucleotide
  source 1..23: mol_type = other DNA
ccgtcctgctgggccacracggt

SEQ ID NO: 5531 - DNA, 23 bp, synthetic construct
  misc_feature 1..23: note = Synthetic Polynucleotide
  source 1..23: mol_type = other DNA
ccccgctgatcatctaccrtgtc

SEQ ID NO: 5532 - DNA, 23 bp, synthetic construct
  misc_feature 1..23: note = Synthetic Polynucleotide
  source 1..23: mol_type = other DNA
cccgctgatcatctaccrtgtca

SEQ ID NO: 5533 - DNA, 23 bp, synthetic construct
  misc_feature 1..23: note = Synthetic Polynucleotide
  source 1..23: mol_type = other DNA
ccgctgatcatctaccrtgtcat

SEQ ID NO: 5534 - DNA, 23 bp, synthetic construct
  misc_feature 1..23: note = Synthetic Polynucleotide
  source 1..23: mol_type = other DNA
ccaccaggtggtggtartcttgg

SEQ ID NO: 5535 - DNA, 23 bp, synthetic construct
  misc_feature 1..23: note = Synthetic Polynucleotide
  source 1..23: mol_type = other DNA
ccctggtttgatatgtrcctatc

SEQ ID NO: 5536 - DNA, 23 bp, synthetic construct
  misc_feature 1..23: note = Synthetic Polynucleotide
  source 1..23: mol_type = other DNA
cctggtttgatatgtrcctatct

SEQ ID NO: 5537 - DNA, 23 bp, synthetic construct
  misc_feature 1..23: note = Synthetic Polynucleotide
  source 1..23: mol_type = other DNA
cccaggacttcgtgtrccacctg

SEQ ID NO: 5538 - DNA, 23 bp, synthetic construct
  misc_feature 1..23: note = Synthetic Polynucleotide
  source 1..23: mol_type = other DNA
ccaggacttcgtgtrccacctgc

SEQ ID NO: 5539 - DNA, 23 bp, synthetic construct
  misc_feature 1..23: note = Synthetic Polynucleotide
  source 1..23: mol_type = other DNA
cctccttcctgggccacartgga

SEQ ID NO: 5540 - DNA, 23 bp, synthetic construct
  misc_feature 1..23: note = Synthetic Polynucleotide
  source 1..23: mol_type = other DNA
ccttcctgggccacartggagcg

SEQ ID NO: 5541 - DNA, 23 bp, synthetic construct
  misc_feature 1..23: note = Synthetic Polynucleotide
  source 1..23: mol_type = other DNA
cccggtaatcgcataraacttaa

SEQ ID NO: 5542 - DNA, 23 bp, synthetic construct
  misc_feature 1..23: note = Synthetic Polynucleotide
  source 1..23: mol_type = other DNA
ccggtaatcgcataraacttaaa

SEQ ID NO: 5543 - DNA, 23 bp, synthetic construct
  misc_feature 1..23: note = Synthetic Polynucleotide
  source 1..23: mol_type = other DNA
ccctcaaacctaagaaatrtgtc

SEQ ID NO: 5544 - DNA, 23 bp, synthetic construct
  misc_feature 1..23: note = Synthetic Polynucleotide
  source 1..23: mol_type = other DNA
cctcaaacctaagaaatrtgtct

SEQ ID NO: 5545 - DNA, 23 bp, synthetic construct
  misc_feature 1..23: note = Synthetic Polynucleotide
  source 1..23: mol_type = other DNA
ccatcattccccctraataaatt

SEQ ID NO: 5546 - DNA, 23 bp, synthetic construct
  misc_feature 1..23: note = Synthetic Polynucleotide
  source 1..23: mol_type = other DNA
ccaagcttgttgcaartatgcta

SEQ ID NO: 5547 - DNA, 23 bp, synthetic construct
  misc_feature 1..23: note = Synthetic Polynucleotide
  source 1..23: mol_type = other DNA
cctggggccgtcgcacctrtgtc

SEQ ID NO: 5548 - DNA, 23 bp, synthetic construct
  misc_feature 1..23: note = Synthetic Polynucleotide
  source 1..23: mol_type = other DNA
ccctgctaccttcgtcarcagtg

SEQ ID NO: 5549 - DNA, 23 bp, synthetic construct
  misc_feature 1..23: note = Synthetic Polynucleotide
  source 1..23: mol_type = other DNA
cctgctaccttcgtcarcagtgc

SEQ ID NO: 5550 - DNA, 23 bp, synthetic construct
  misc_feature 1..23: note = Synthetic Polynucleotide
  source 1..23: mol_type = other DNA
ccctgagctcattaactrccatc

SEQ ID NO: 5551 - DNA, 23 bp, synthetic construct
  misc_feature 1..23: note = Synthetic Polynucleotide
  source 1..23: mol_type = other DNA
cctgagctcattaactrccatca

SEQ ID NO: 5552 - DNA, 23 bp, synthetic construct
  misc_feature 1..23: note = Synthetic Polynucleotide
  source 1..23: mol_type = other DNA
cccgagctccctgcgcraacaca

SEQ ID NO: 5553 - DNA, 23 bp, synthetic construct
  misc_feature 1..23: note = Synthetic Polynucleotide
  source 1..23: mol_type = other DNA
ccgagctccctgcgcraacacat

SEQ ID NO: 5554 - DNA, 23 bp, synthetic construct
  misc_feature 1..23: note = Synthetic Polynucleotide
  source 1..23: mol_type = other DNA
ccttcttgttactctrtttcaat

SEQ ID NO: 5555 - DNA, 23 bp, synthetic construct
  misc_feature 1..23: note = Synthetic Polynucleotide
  source 1..23: mol_type = other DNA
ccacagcggtcatctctrcctgc

SEQ ID NO: 5556 - DNA, 23 bp, synthetic construct
  misc_feature 1..23: note = Synthetic Polynucleotide
  source 1..23: mol_type = other DNA
ccgctctatgacttccrcctggc

SEQ ID NO: 5557 - DNA, 23 bp, synthetic construct
  misc_feature 1..23: note = Synthetic Polynucleotide
  source 1..23: mol_type = other DNA
ccctggccacatgtgtcartgtg

SEQ ID NO: 5558 - DNA, 23 bp, synthetic construct
  misc_feature 1..23: note = Synthetic Polynucleotide
  source 1..23: mol_type = other DNA
cctggccacatgtgtcartgtgg

SEQ ID NO: 5559 - DNA, 23 bp, synthetic construct
  misc_feature 1..23: note = Synthetic Polynucleotide
  source 1..23: mol_type = other DNA
ccgcaggaatcctgtactrtgtc

SEQ ID NO: 5560 - DNA, 23 bp, synthetic construct
  misc_feature 1..23: note = Synthetic Polynucleotide
  source 1..23: mol_type = other DNA
ccagccgcttcctgcacrtgaag

SEQ ID NO: 5561 - DNA, 23 bp, synthetic construct
  misc_feature 1..23: note = Synthetic Polynucleotide
  source 1..23: mol_type = other DNA
ccccacatccagtggatcragca

SEQ ID NO: 5562 - DNA, 23 bp, synthetic construct
  misc_feature 1..23: note = Synthetic Polynucleotide
  source 1..23: mol_type = other DNA
cccacatccagtggatcragcac

SEQ ID NO: 5563 - DNA, 23 bp, synthetic construct
  misc_feature 1..23: note = Synthetic Polynucleotide
  source 1..23: mol_type = other DNA
ccacatccagtggatcragcacg

SEQ ID NO: 5564 - DNA, 23 bp, synthetic construct
  misc_feature 1..23: note = Synthetic Polynucleotide
  source 1..23: mol_type = other DNA
ccgccctgctgagcccctrctcc

SEQ ID NO: 5565 - DNA, 23 bp, synthetic construct
  misc_feature 1..23: note = Synthetic Polynucleotide
  source 1..23: mol_type = other DNA
ccctgctgagcccctrctcctat

SEQ ID NO: 5566 - DNA, 23 bp, synthetic construct
  misc_feature 1..23: note = Synthetic Polynucleotide
  source 1..23: mol_type = other DNA
cctgctgagcccctrctcctatt

SEQ ID NO: 5567 - DNA, 23 bp, synthetic construct
  misc_feature 1..23: note = Synthetic Polynucleotide
  source 1..23: mol_type = other DNA
cccccgccgctacaccrttgccg

SEQ ID NO: 5568 - DNA, 23 bp, synthetic construct
  misc_feature 1..23: note = Synthetic Polynucleotide
  source 1..23: mol_type = other DNA
ccccgccgctacaccrttgccgc

SEQ ID NO: 5569 - DNA, 23 bp, synthetic construct
  misc_feature 1..23: note = Synthetic Polynucleotide
  source 1..23: mol_type = other DNA
cccgccgctacaccrttgccgcc

SEQ ID NO: 5570 - DNA, 23 bp, synthetic construct
  misc_feature 1..23: note = Synthetic Polynucleotide
  source 1..23: mol_type = other DNA
ccttctgctggccaacarcagcc

SEQ ID NO: 5571 - DNA, 23 bp, synthetic construct
  misc_feature 1..23: note = Synthetic Polynucleotide
  source 1..23: mol_type = other DNA
ccctcatgtctgaactcraagtc

SEQ ID NO: 5572 - DNA, 23 bp, synthetic construct
  misc_feature 1..23: note = Synthetic Polynucleotide
  source 1..23: mol_type = other DNA
cctcatgtctgaactcraagtcc

SEQ ID NO: 5573 - DNA, 23 bp, synthetic construct
  misc_feature 1..23: note = Synthetic Polynucleotide
  source 1..23: mol_type = other DNA
cctcatagatcttccrctatgcc

SEQ ID NO: 5574 - DNA, 23 bp, synthetic construct
  misc_feature 1..23: note = Synthetic Polynucleotide
  source 1..23: mol_type = other DNA
cctcatcttcaccgrtttcacct

SEQ ID NO: 5575 - DNA, 23 bp, synthetic construct
  misc_feature 1..23: note = Synthetic Polynucleotide
  source 1..23: mol_type = other DNA
ccgccgcctccggaacyaaacgg

SEQ ID NO: 5576 - DNA, 23 bp, synthetic construct
  misc_feature 1..23: note = Synthetic Polynucleotide
  source 1..23: mol_type = other DNA
ccaccatgcagaacctcvatgac

SEQ ID NO: 5577 - DNA, 23 bp, synthetic construct
  misc_feature 1..23: note = Synthetic Polynucleotide
  source 1..23: mol_type = other DNA
ccatgcagaacctcvatgaccgc

SEQ ID NO: 5578 - DNA, 23 bp, synthetic construct
  misc_feature 1..23: note = Synthetic Polynucleotide
  source 1..23: mol_type = other DNA
ccaccatgcagaacctcartgac

SEQ ID NO: 5579 - DNA, 23 bp, synthetic construct
  misc_feature 1..23: note = Synthetic Polynucleotide
  source 1..23: mol_type = other DNA
ccatgcagaacctcartgaccgc

SEQ ID NO: 5580 - DNA, 23 bp, synthetic construct
  misc_feature 1..23: note = Synthetic Polynucleotide
  source 1..23: mol_type = other DNA
cctgcaggcgtctctccragtcg

SEQ ID NO: 5581 - DNA, 23 bp, synthetic construct
  misc_feature 1..23: note = Synthetic Polynucleotide
  source 1..23: mol_type = other DNA
ccccgagcgtgcgccctdccgcg

SEQ ID NO: 5582 - DNA, 23 bp, synthetic construct
  misc_feature 1..23: note = Synthetic Polynucleotide
  source 1..23: mol_type = other DNA
cccgagcgtgcgccctdccgcga

SEQ ID NO: 5583 - DNA, 23 bp, synthetic construct
  misc_feature 1..23: note = Synthetic Polynucleotide
  source 1..23: mol_type = other DNA
ccgagcgtgcgccctdccgcgac

SEQ ID NO: 5584 - DNA, 23 bp, synthetic construct
  misc_feature 1..23: note = Synthetic Polynucleotide
  source 1..23: mol_type = other DNA
ccccactctaggtgtcctvtgtg

SEQ ID NO: 5585 - DNA, 23 bp, synthetic construct
  misc_feature 1..23: note = Synthetic Polynucleotide
  source 1..23: mol_type = other DNA
cccactctaggtgtcctvtgtga

SEQ ID NO: 5586 - DNA, 23 bp, synthetic construct
  misc_feature 1..23: note = Synthetic Polynucleotide
  source 1..23: mol_type = other DNA
ccactctaggtgtcctvtgtgaa

SEQ ID NO: 5587 - DNA, 23 bp, synthetic construct
  misc_feature 1..23: note = Synthetic Polynucleotide
  source 1..23: mol_type = other DNA
ccgcaccccagtgcatccrcaga

SEQ ID NO: 5588 - DNA, 23 bp, synthetic construct
  misc_feature 1..23: note = Synthetic Polynucleotide
  source 1..23: mol_type = other DNA
cccctggggtcacctrttacttc

SEQ ID NO: 5589 - DNA, 23 bp, synthetic construct
  misc_feature 1..23: note = Synthetic Polynucleotide
  source 1..23: mol_type = other DNA
ccctggggtcacctrttacttca

SEQ ID NO: 5590 - DNA, 23 bp, synthetic construct
  misc_feature 1..23: note = Synthetic Polynucleotide
  source 1..23: mol_type = other DNA
ccgatggcccctactccarccct

SEQ ID NO: 5591 - DNA, 23 bp, synthetic construct
  misc_feature 1..23: note = Synthetic Polynucleotide
  source 1..23: mol_type = other DNA
cccctcacccaatctaccytgat

SEQ ID NO: 5592 - DNA, 23 bp, synthetic construct
  misc_feature 1..23: note = Synthetic Polynucleotide
  source 1..23: mol_type = other DNA
ccctcacccaatctaccytgatg

SEQ ID NO: 5593 - DNA, 23 bp, synthetic construct
  misc_feature 1..23: note = Synthetic Polynucleotide
  source 1..23: mol_type = other DNA
cctcacccaatctaccytgatgg

SEQ ID NO: 5594 - DNA, 23 bp, synthetic construct
  misc_feature 1..23: note = Synthetic Polynucleotide
  source 1..23: mol_type = other DNA
cccagaacatcacctrccactgc

SEQ ID NO: 5595 - DNA, 23 bp, synthetic construct
  misc_feature 1..23: note = Synthetic Polynucleotide
  source 1..23: mol_type = other DNA
ccagaacatcacctrccactgca

SEQ ID NO: 5596 - DNA, 23 bp, synthetic construct
  misc_feature 1..23: note = Synthetic Polynucleotide
  source 1..23: mol_type = other DNA
ccattctggtgccactnccacag

SEQ ID NO: 5597 - DNA, 23 bp, synthetic construct
  misc_feature 1..23: note = Synthetic Polynucleotide
  source 1..23: mol_type = other DNA
ccctgaggtcagaccarcttcag

SEQ ID NO: 5598 - DNA, 23 bp, synthetic construct
  misc_feature 1..23: note = Synthetic Polynucleotide
  source 1..23: mol_type = other DNA
cctgaggtcagaccarcttcagc

SEQ ID NO: 5599 - DNA, 23 bp, synthetic construct
  misc_feature 1..23: note = Synthetic Polynucleotide
  source 1..23: mol_type = other DNA
ccagagcggccatcracaaatgg

SEQ ID NO: 5600 - DNA, 23 bp, synthetic construct
  misc_feature 1..23: note = Synthetic Polynucleotide
  source 1..23: mol_type = other DNA
cccagaacatcttcttcrtgagc

SEQ ID NO: 5601 - DNA, 23 bp, synthetic construct
  misc_feature 1..23: note = Synthetic Polynucleotide
  source 1..23: mol_type = other DNA
ccagaacatcttcttcrtgagca

SEQ ID NO: 5602 - DNA, 23 bp, synthetic construct
  misc_feature 1..23: note = Synthetic Polynucleotide
  source 1..23: mol_type = other DNA
cccagcactatgatgccraacca

SEQ ID NO: 5603 - DNA, 23 bp, synthetic construct
  misc_feature 1..23: note = Synthetic Polynucleotide
  source 1..23: mol_type = other DNA
ccagcactatgatgccraaccac

SEQ ID NO: 5604 - DNA, 23 bp, synthetic construct
  misc_feature 1..23: note = Synthetic Polynucleotide
  source 1..23: mol_type = other DNA
ccctcaatcccaaggccarccgc

SEQ ID NO: 5605 - DNA, 23 bp, synthetic construct
  misc_feature 1..23: note = Synthetic Polynucleotide
  source 1..23: mol_type = other DNA
cctcaatcccaaggccarccgcg

SEQ ID NO: 5606 - DNA, 23 bp, synthetic construct
  misc_feature 1..23: note = Synthetic Polynucleotide
  source 1..23: mol_type = other DNA
cctgtactcgctggtcracgcct

SEQ ID NO: 5607 - DNA, 23 bp, synthetic construct
  misc_feature 1..23: note = Synthetic Polynucleotide
  source 1..23: mol_type = other DNA
ccttcgacatcaccatcrtgatc

SEQ ID NO: 5608 - DNA, 23 bp, synthetic construct
  misc_feature 1..23: note = Synthetic Polynucleotide
  source 1..23: mol_type = other DNA
cctgttggcttaaacartaaaga

SEQ ID NO: 5609 - DNA, 23 bp, synthetic construct
  misc_feature 1..23: note = Synthetic Polynucleotide
  source 1..23: mol_type = other DNA
cctaagcacaatagcartagaca

SEQ ID NO: 5610 - DNA, 23 bp, synthetic construct
  misc_feature 1..23: note = Synthetic Polynucleotide
  source 1..23: mol_type = other DNA
cctgcatcctccaccttcrgggc

SEQ ID NO: 5611 - DNA, 23 bp, synthetic construct
  misc_feature 1..23: note = Synthetic Polynucleotide
  source 1..23: mol_type = other DNA
ccattgatggcttcttttrgggt

SEQ ID NO: 5612 - DNA, 23 bp, synthetic construct
  misc_feature 1..23: note = Synthetic Polynucleotide
  source 1..23: mol_type = other DNA
cctttctttatcttactcrggtg

SEQ ID NO: 5613 - DNA, 23 bp, synthetic construct
  misc_feature 1..23: note = Synthetic Polynucleotide
  source 1..23: mol_type = other DNA
ccagaaccttgacatctrtgaac

SEQ ID NO: 5614 - DNA, 23 bp, synthetic construct
  misc_feature 1..23: note = Synthetic Polynucleotide
  source 1..23: mol_type = other DNA
ccgctaccgtaaacacarcctct

SEQ ID NO: 5615 - DNA, 23 bp, synthetic construct
  misc_feature 1..23: note = Synthetic Polynucleotide
  source 1..23: mol_type = other DNA
cccgacctggtgtccccarggtg

SEQ ID NO: 5616 - DNA, 23 bp, synthetic construct
  misc_feature 1..23: note = Synthetic Polynucleotide
  source 1..23: mol_type = other DNA
ccgacctggtgtccccarggtga

SEQ ID NO: 5617 - DNA, 23 bp, synthetic construct
  misc_feature 1..23: note = Synthetic Polynucleotide
  source 1..23: mol_type = other DNA
cccggcgccgcaagctctrctgc

SEQ ID NO: 5618 - DNA, 23 bp, synthetic construct
  misc_feature 1..23: note = Synthetic Polynucleotide
  source 1..23: mol_type = other DNA
ccggcgccgcaagctctrctgcg

SEQ ID NO: 5619 - DNA, 23 bp, synthetic construct
  misc_feature 1..23: note = Synthetic Polynucleotide
  source 1..23: mol_type = other DNA
ccccgaaggctacagatrtaatc

SEQ ID NO: 5620 - DNA, 23 bp, synthetic construct
  misc_feature 1..23: note = Synthetic Polynucleotide
  source 1..23: mol_type = other DNA
cccgaaggctacagatrtaatct

SEQ ID NO: 5621 - DNA, 23 bp, synthetic construct
  misc_feature 1..23: note = Synthetic Polynucleotide
  source 1..23: mol_type = other DNA
ccgaaggctacagatrtaatctc

SEQ ID NO: 5622 - DNA, 23 bp, synthetic construct
  misc_feature 1..23: note = Synthetic Polynucleotide
  source 1..23: mol_type = other DNA
cctctgtacaaaagacartttta

SEQ ID NO: 5623 - DNA, 23 bp, synthetic construct
  misc_feature 1..23: note = Synthetic Polynucleotide
  source 1..23: mol_type = other DNA
cctcctcaaagcaatacrctgaa

SEQ ID NO: 5624 - DNA, 23 bp, synthetic construct
  misc_feature 1..23: note = Synthetic Polynucleotide
  source 1..23: mol_type = other DNA
cctcaaagcaatacrctgaaaat

SEQ ID NO: 5625 - DNA, 23 bp, synthetic construct
  misc_feature 1..23: note = Synthetic Polynucleotide
  source 1..23: mol_type = other DNA
ccaatcaggtaatctrcttgaat

SEQ ID NO: 5626 - DNA, 23 bp, synthetic construct
  misc_feature 1..23: note = Synthetic Polynucleotide
  source 1..23: mol_type = other DNA
ccttccctccaggctvcttgtac

SEQ ID NO: 5627 - DNA, 23 bp, synthetic construct
  misc_feature 1..23: note = Synthetic Polynucleotide
  source 1..23: mol_type = other DNA
ccatcatcctggagracttcagt

SEQ ID NO: 5628 - DNA, 23 bp, synthetic construct
  misc_feature 1..23: note = Synthetic Polynucleotide
  source 1..23: mol_type = other DNA
ccaaacacttctctrtaatcttt

SEQ ID NO: 5629 - DNA, 23 bp, synthetic construct
  misc_feature 1..23: note = Synthetic Polynucleotide
  source 1..23: mol_type = other DNA
ccacctggcagaaaatctrcttc

SEQ ID NO: 5630 - DNA, 23 bp, synthetic construct
  misc_feature 1..23: note = Synthetic Polynucleotide
  source 1..23: mol_type = other DNA
cctggcagaaaatctrcttctac

SEQ ID NO: 5631 - DNA, 23 bp, synthetic construct
  misc_feature 1..23: note = Synthetic Polynucleotide
  source 1..23: mol_type = other DNA
ccctcaaaggttcarcatacaaa

SEQ ID NO: 5632 - DNA, 23 bp, synthetic construct
  misc_feature 1..23: note = Synthetic Polynucleotide
  source 1..23: mol_type = other DNA
ccctcagcatctcccttcrtgtc

SEQ ID NO: 5633 - DNA, 23 bp, synthetic construct
  misc_feature 1..23: note = Synthetic Polynucleotide
  source 1..23: mol_type = other DNA
cctcagcatctcccttcrtgtct

SEQ ID NO: 5634 - DNA, 23 bp, synthetic construct
  misc_feature 1..23: note = Synthetic Polynucleotide
  source 1..23: mol_type = other DNA
ccaccgtggacacctyctttgcc

SEQ ID NO: 5635 - DNA, 23 bp, synthetic construct
  misc_feature 1..23: note = Synthetic Polynucleotide
  source 1..23: mol_type = other DNA
cccctttgcagagaracactgca

SEQ ID NO: 5636 - DNA, 23 bp, synthetic construct
  misc_feature 1..23: note = Synthetic Polynucleotide
  source 1..23: mol_type = other DNA
cccctcaagcaccaacacrtttt

SEQ ID NO: 5637 - DNA, 23 bp, synthetic construct
  misc_feature 1..23: note = Synthetic Polynucleotide
  source 1..23: mol_type = other DNA
ccctcaagcaccaacacrttttc

SEQ ID NO: 5638 - DNA, 23 bp, synthetic construct
  misc_feature 1..23: note = Synthetic Polynucleotide
  source 1..23: mol_type = other DNA
cctcaagcaccaacacrttttct

SEQ ID NO: 5639 - DNA, 23 bp, synthetic construct
  misc_feature 1..23: note = Synthetic Polynucleotide
  source 1..23: mol_type = other DNA
cctgcagtgctttccctcrgtgc

SEQ ID NO: 5640 - DNA, 23 bp, synthetic construct
  misc_feature 1..23: note = Synthetic Polynucleotide
  source 1..23: mol_type = other DNA
ccagcgagcgggagraactgcgc

SEQ ID NO: 5641 - DNA, 23 bp, synthetic construct
  misc_feature 1..23: note = Synthetic Polynucleotide
  source 1..23: mol_type = other DNA
ccataaggagcgccccrcagtca

SEQ ID NO: 5642 - DNA, 23 bp, synthetic construct
  misc_feature 1..23: note = Synthetic Polynucleotide
  source 1..23: mol_type = other DNA
cctgatcatcttcacctrctaca

SEQ ID NO: 5643 - DNA, 23 bp, synthetic construct
  misc_feature 1..23: note = Synthetic Polynucleotide
  source 1..23: mol_type = other DNA
ccattgtcatacacarcctagac

SEQ ID NO: 5644 - DNA, 23 bp, synthetic construct
  misc_feature 1..23: note = Synthetic Polynucleotide
  source 1..23: mol_type = other DNA
ccacaaaagaaattrcaaatgga

SEQ ID NO: 5645 - DNA, 23 bp, synthetic construct
  misc_feature 1..23: note = Synthetic Polynucleotide
  source 1..23: mol_type = other DNA
cctgcctgcttcatcrcacagct

SEQ ID NO: 5646 - DNA, 23 bp, synthetic construct
  misc_feature 1..23: note = Synthetic Polynucleotide
  source 1..23: mol_type = other DNA
ccctgagggacagttcrttgata

SEQ ID NO: 5647 - DNA, 23 bp, synthetic construct
  misc_feature 1..23: note = Synthetic Polynucleotide
  source 1..23: mol_type = other DNA
cctgagggacagttcrttgatag

SEQ ID NO: 5648 - DNA, 23 bp, synthetic construct
  misc_feature 1..23: note = Synthetic Polynucleotide
  source 1..23: mol_type = other DNA
cccacgggtacaacrttaccgag

SEQ ID NO: 5649 - DNA, 23 bp, synthetic construct
  misc_feature 1..23: note = Synthetic Polynucleotide
  source 1..23: mol_type = other DNA
ccgagtctgttgcactaytgggg

SEQ ID NO: 5650 - DNA, 23 bp, synthetic construct
  misc_feature 1..23: note = Synthetic Polynucleotide
  source 1..23: mol_type = other DNA
ccagctgcccttccccarccacg

SEQ ID NO: 5651 - DNA, 23 bp, synthetic construct
  misc_feature 1..23: note = Synthetic Polynucleotide
  source 1..23: mol_type = other DNA
cctgagtagaccatrtccttaaa

SEQ ID NO: 5652 - DNA, 23 bp, synthetic construct
  misc_feature 1..23: note = Synthetic Polynucleotide
  source 1..23: mol_type = other DNA
ccctccagcaccttcaycaggaa

SEQ ID NO: 5653 - DNA, 23 bp, synthetic construct
  misc_feature 1..23: note = Synthetic Polynucleotide
  source 1..23: mol_type = other DNA
cctccagcaccttcaycaggaaa

SEQ ID NO: 5654 - DNA, 23 bp, synthetic construct
  misc_feature 1..23: note = Synthetic Polynucleotide
  source 1..23: mol_type = other DNA
ccccaaaaggaggctgaaratca

SEQ ID NO: 5655 - DNA, 23 bp, synthetic construct
  misc_feature 1..23: note = Synthetic Polynucleotide
  source 1..23: mol_type = other DNA
cccaaaaggaggctgaaratcag

SEQ ID NO: 5656 - DNA, 23 bp, synthetic construct
  misc_feature 1..23: note = Synthetic Polynucleotide
  source 1..23: mol_type = other DNA
ccaaaaggaggctgaaratcagc

SEQ ID NO: 5657 - DNA, 23 bp, synthetic construct
  misc_feature 1..23: note = Synthetic Polynucleotide
  source 1..23: mol_type = other DNA
ccagggccgcgtctrcaacttcc

SEQ ID NO: 5658 - DNA, 23 bp, synthetic construct
  misc_feature 1..23: note = Synthetic Polynucleotide
  source 1..23: mol_type = other DNA
cccagcgcccgagagaccrtgca

SEQ ID NO: 5659 - DNA, 23 bp, synthetic construct
  misc_feature 1..23: note = Synthetic Polynucleotide
  source 1..23: mol_type = other DNA
ccagcgcccgagagaccrtgcag

SEQ ID NO: 5660 - DNA, 23 bp, synthetic construct
  misc_feature 1..23: note = Synthetic Polynucleotide
  source 1..23: mol_type = other DNA
ccacaaagtgtgaccrcatattt

SEQ ID NO: 5661 - DNA, 23 bp, synthetic construct
  misc_feature 1..23: note = Synthetic Polynucleotide
  source 1..23: mol_type = other DNA
ccttccatttatctttctrggtc

SEQ ID NO: 5662 - DNA, 23 bp, synthetic construct
  misc_feature 1..23: note = Synthetic Polynucleotide
  source 1..23: mol_type = other DNA
ccatttatctttctrggtcatcc

SEQ ID NO: 5663 - DNA, 23 bp, synthetic construct
  misc_feature 1..23: note = Synthetic Polynucleotide
  source 1..23: mol_type = other DNA
ccaccttatcgagcrctcaaggc

SEQ ID NO: 5664 - DNA, 23 bp, synthetic construct
  misc_feature 1..23: note = Synthetic Polynucleotide
  source 1..23: mol_type = other DNA
cctgcagagcttggactrtgaca

SEQ ID NO: 5665 - DNA, 23 bp, synthetic construct
  misc_feature 1..23: note = Synthetic Polynucleotide
  source 1..23: mol_type = other DNA
cccgccgcagcagcttcayggcg

SEQ ID NO: 5666 - DNA, 23 bp, synthetic construct
  misc_feature 1..23: note = Synthetic Polynucleotide
  source 1..23: mol_type = other DNA
ccgccgcagcagcttcayggcgc

SEQ ID NO: 5667 - DNA, 23 bp, synthetic construct
  misc_feature 1..23: note = Synthetic Polynucleotide
  source 1..23: mol_type = other DNA
ccgcagcagcttcayggcgcccg

SEQ ID NO: 5668 - DNA, 23 bp, synthetic construct
  misc_feature 1..23: note = Synthetic Polynucleotide
  source 1..23: mol_type = other DNA
ccgagagagatggaataargccc

SEQ ID NO: 5669 - DNA, 23 bp, synthetic construct
  misc_feature 1..23: note = Synthetic Polynucleotide
  source 1..23: mol_type = other DNA
ccacctctcaaaggrccctgaga

SEQ ID NO: 5670 - DNA, 23 bp, synthetic construct
  misc_feature 1..23: note = Synthetic Polynucleotide
  source 1..23: mol_type = other DNA
ccgtggtggccttcracttcttc

SEQ ID NO: 5671 - DNA, 23 bp, synthetic construct
  misc_feature 1..23: note = Synthetic Polynucleotide
  source 1..23: mol_type = other DNA
ccgcatcgccgtccactncttca

SEQ ID NO: 5672 - DNA, 23 bp, synthetic construct
  misc_feature 1..23: note = Synthetic Polynucleotide
  source 1..23: mol_type = other DNA
ccgggccctgaaaactrtatcag

SEQ ID NO: 5673 - DNA, 23 bp, synthetic construct
  misc_feature 1..23: note = Synthetic Polynucleotide
  source 1..23: mol_type = other DNA
cccattgttttctcatacrggtt

SEQ ID NO: 5674 - DNA, 23 bp, synthetic construct
  misc_feature 1..23: note = Synthetic Polynucleotide
  source 1..23: mol_type = other DNA
ccattgttttctcatacrggtta

SEQ ID NO: 5675 - DNA, 23 bp, synthetic construct
  misc_feature 1..23: note = Synthetic Polynucleotide
  source 1..23: mol_type = other DNA
ccttcttgccaaccaaccrtgag

SEQ ID NO: 5676 - DNA, 23 bp, synthetic construct
  misc_feature 1..23: note = Synthetic Polynucleotide
  source 1..23: mol_type = other DNA
ccctgctgacagattrctcacct

SEQ ID NO: 5677 - DNA, 23 bp, synthetic construct
  misc_feature 1..23: note = Synthetic Polynucleotide
  source 1..23: mol_type = other DNA
cctgctgacagattrctcacctc

SEQ ID NO: 5678 - DNA, 23 bp, synthetic construct
  misc_feature 1..23: note = Synthetic Polynucleotide
  source 1..23: mol_type = other DNA
ccacacaagatattcdtttgggt

SEQ ID NO: 5679 - DNA, 23 bp, synthetic construct
  misc_feature 1..23: note = Synthetic Polynucleotide
  source 1..23: mol_type = other DNA
ccagatcctggctgdttacctca

SEQ ID NO: 5680 - DNA, 23 bp, synthetic construct
  misc_feature 1..23: note = Synthetic Polynucleotide
  source 1..23: mol_type = other DNA
ccagatcctggctgattrcctca

SEQ ID NO: 5681 - DNA, 23 bp, synthetic construct
  misc_feature 1..23: note = Synthetic Polynucleotide
  source 1..23: mol_type = other DNA
cccgtgccttttaggracactat

SEQ ID NO: 5682 - DNA, 23 bp, synthetic construct
  misc_feature 1..23: note = Synthetic Polynucleotide
  source 1..23: mol_type = other DNA
ccgtgccttttaggracactata

SEQ ID NO: 5683 - DNA, 23 bp, synthetic construct
  misc_feature 1..23: note = Synthetic Polynucleotide
  source 1..23: mol_type = other DNA
ccccagacttcggccccrtgcgg

SEQ ID NO: 5684 - DNA, 23 bp, synthetic construct
  misc_feature 1..23: note = Synthetic Polynucleotide
  source 1..23: mol_type = other DNA
cccagacttcggccccrtgcggc

SEQ ID NO: 5685 - DNA, 23 bp, synthetic construct
  misc_feature 1..23: note = Synthetic Polynucleotide
  source 1..23: mol_type = other DNA
ccagacttcggccccrtgcggct

SEQ ID NO: 5686 - DNA, 23 bp, synthetic construct
  misc_feature 1..23: note = Synthetic Polynucleotide
  source 1..23: mol_type = other DNA
cccagaagccattgraatctacc

SEQ ID NO: 5687 - DNA, 23 bp, synthetic construct
  misc_feature 1..23: note = Synthetic Polynucleotide
  source 1..23: mol_type = other DNA
cctgagaagaaaactcctyctac

SEQ ID NO: 5688 - DNA, 23 bp, synthetic construct
  misc_feature 1..23: note = Synthetic Polynucleotide
  source 1..23: mol_type = other DNA
cccattcaacgtctdcatcgagt

SEQ ID NO: 5689 - DNA, 23 bp, synthetic construct
  misc_feature 1..23: note = Synthetic Polynucleotide
  source 1..23: mol_type = other DNA
ccgactaccccgactrcaagtac

SEQ ID NO: 5690 - DNA, 23 bp, synthetic construct
  misc_feature 1..23: note = Synthetic Polynucleotide
  source 1..23: mol_type = other DNA
ccaagcttgttgcaaatrtgcta

SEQ ID NO: 5691 - DNA, 23 bp, synthetic construct
  misc_feature 1..23: note = Synthetic Polynucleotide
  source 1..23: mol_type = other DNA
cctgcttctgtctcctacrgcca

SEQ ID NO: 5692 - DNA, 23 bp, synthetic construct
  misc_feature 1..23: note = Synthetic Polynucleotide
  source 1..23: mol_type = other DNA
ccgtcttcaccgtcttcrtgcta

SEQ ID NO: 5693 - DNA, 23 bp, synthetic construct
  misc_feature 1..23: note = Synthetic Polynucleotide
  source 1..23: mol_type = other DNA
ccacaatgatgtcctaaractgt

SEQ ID NO: 5694 - DNA, 23 bp, synthetic construct
  misc_feature 1..23: note = Synthetic Polynucleotide
  source 1..23: mol_type = other DNA
ccaccttcatagccaacaytgtc

SEQ ID NO: 5695 - DNA, 23 bp, synthetic construct
  misc_feature 1..23: note = Synthetic Polynucleotide
  source 1..23: mol_type = other DNA
ccttcatagccaacaytgtcaaa

SEQ ID NO: 5696 - DNA, 23 bp, synthetic construct
  misc_feature 1..23: note = Synthetic Polynucleotide
  source 1..23: mol_type = other DNA
ccaacattgatgagatctrtaag

SEQ ID NO: 5697 - DNA, 23 bp, synthetic construct
  misc_feature 1..23: note = Synthetic Polynucleotide
  source 1..23: mol_type = other DNA
ccaaactgaagcgctcctdctcc

SEQ ID NO: 5698 - DNA, 23 bp, synthetic construct
  misc_feature 1..23: note = Synthetic Polynucleotide
  source 1..23: mol_type = other DNA
ccgctgccccccttcccarggct

SEQ ID NO: 5699 - DNA, 23 bp, synthetic construct
  misc_feature 1..23: note = Synthetic Polynucleotide
  source 1..23: mol_type = other DNA
cccttctctgctggccccrggaa

SEQ ID NO: 5700 - DNA, 23 bp, synthetic construct
  misc_feature 1..23: note = Synthetic Polynucleotide
  source 1..23: mol_type = other DNA
ccttctctgctggccccrggaac

SEQ ID NO: 5701 - DNA, 23 bp, synthetic construct
  misc_feature 1..23: note = Synthetic Polynucleotide
  source 1..23: mol_type = other DNA
ccatccactacaactacrtgtgt

SEQ ID NO: 5702 - DNA, 23 bp, synthetic construct
  misc_feature 1..23: note = Synthetic Polynucleotide
  source 1..23: mol_type = other DNA
cccctctcctctgcagractatg

SEQ ID NO: 5703 - DNA, 23 bp, synthetic construct
  misc_feature 1..23: note = Synthetic Polynucleotide
  source 1..23: mol_type = other DNA
ccctctcctctgcagractatga

SEQ ID NO: 5704 - DNA, 23 bp, synthetic construct
  misc_feature 1..23: note = Synthetic Polynucleotide
  source 1..23: mol_type = other DNA
cctctcctctgcagractatgaa

SEQ ID NO: 5705 - DNA, 23 bp, synthetic construct
  misc_feature 1..23: note = Synthetic Polynucleotide
  source 1..23: mol_type = other DNA
cctttctttttttttcaargcga

SEQ ID NO: 5706 - DNA, 23 bp, synthetic construct
  misc_feature 1..23: note = Synthetic Polynucleotide
  source 1..23: mol_type = other DNA
cctgggaggagatacacrtttcg

SEQ ID NO: 5707 - DNA, 23 bp, synthetic construct
  misc_feature 1..23: note = Synthetic Polynucleotide
  source 1..23: mol_type = other DNA
cctaaaactgtgtgrctttggta

SEQ ID NO: 5708 - DNA, 23 bp, synthetic construct
  misc_feature 1..23: note = Synthetic Polynucleotide
  source 1..23: mol_type = other DNA
cctatcaccattgcrctttatta

SEQ ID NO: 5709 - DNA, 23 bp, synthetic construct
  misc_feature 1..23: note = Synthetic Polynucleotide
  source 1..23: mol_type = other DNA
ccacttggaccaccaccrcctcg

SEQ ID NO: 5710 - DNA, 23 bp, synthetic construct
  misc_feature 1..23: note = Synthetic Polynucleotide
  source 1..23: mol_type = other DNA
ccagtctttaccaccyaaaaaac

SEQ ID NO: 5711 - DNA, 23 bp, synthetic construct
  misc_feature 1..23: note = Synthetic Polynucleotide
  source 1..23: mol_type = other DNA
cctgtgagtggcctctttrtatg

SEQ ID NO: 5712 - DNA, 23 bp, synthetic construct
  misc_feature 1..23: note = Synthetic Polynucleotide
  source 1..23: mol_type = other DNA
cctggagatcaccttcancctgc

SEQ ID NO: 5713 - DNA, 23 bp, synthetic construct
  misc_feature 1..23: note = Synthetic Polynucleotide
  source 1..23: mol_type = other DNA
cctgcactccacagrcctcatcg

SEQ ID NO: 5714 - DNA, 23 bp, synthetic construct
  misc_feature 1..23: note = Synthetic Polynucleotide
  source 1..23: mol_type = other DNA
ccttgttggcagctaacracttg

SEQ ID NO: 5715 - DNA, 23 bp, synthetic construct
  misc_feature 1..23: note = Synthetic Polynucleotide
  source 1..23: mol_type = other DNA
ccttgacgatattctrctttatt

SEQ ID NO: 5716 - DNA, 23 bp, synthetic construct
  misc_feature 1..23: note = Synthetic Polynucleotide
  source 1..23: mol_type = other DNA
ccgtgagcatgccaraatcttca

SEQ ID NO: 5717 - DNA, 23 bp, synthetic construct
  misc_feature 1..23: note = Synthetic Polynucleotide
  source 1..23: mol_type = other DNA
cctgttctcgctcatcartgggg

SEQ ID NO: 5718 - DNA, 23 bp, synthetic construct
  misc_feature 1..23: note = Synthetic Polynucleotide
  source 1..23: mol_type = other DNA
cccatccttttccttcccrgggc

SEQ ID NO: 5719 - DNA, 23 bp, synthetic construct
  misc_feature 1..23: note = Synthetic Polynucleotide
  source 1..23: mol_type = other DNA
ccatccttttccttcccrgggct

SEQ ID NO: 5720 - DNA, 23 bp, synthetic construct
  misc_feature 1..23: note = Synthetic Polynucleotide
  source 1..23: mol_type = other DNA
cctcttcgtgcaatrtatcatca

SEQ ID NO: 5721 - DNA, 23 bp, synthetic construct
  misc_feature 1..23: note = Synthetic Polynucleotide
  source 1..23: mol_type = other DNA
cctctgcttttgctctatrgtta

SEQ ID NO: 5722 - DNA, 23 bp, synthetic construct
  misc_feature 1..23: note = Synthetic Polynucleotide
  source 1..23: mol_type = other DNA
ccctgctctgtgcctcacrgaac

SEQ ID NO: 5723 - DNA, 23 bp, synthetic construct
  misc_feature 1..23: note = Synthetic Polynucleotide
  source 1..23: mol_type = other DNA
cctgctctgtgcctcacrgaact

SEQ ID NO: 5724 - protein, 236 aa, Homo sapiens; identical to SEQ ID NO: 282

SEQ ID NO: 5725 - protein, 239 aa, Rattus rattus
MAVGSKPKAALVGPHWERERIWCFLCSTGLGTQQTGQTSRWLRPAATQDPVSPPRSLLMKQRKFLYHFKNVRWAKGRHETYLCYVVKRRDSATSFSLDFGYLRNKSGCHVELLFLRYISDWDLDPGRCYRVTWFTSWSPCYDCARHVADFLRGNPNLSLRIFTARLTGWGALPAGLMSPARPSDYFYCWNTFVENHERTFKAWEGLHENSVRLSRRLRRILLPLYEVDDLRDAFRTLGL

SEQ ID NO: 5726 - protein, 190 aa, Gorilla gorilla
MNPQIRNPMKAMYPGTFYFQFKNLWEANDRNETWLCFTVEGIKRRSVVSWKTGVFRNQVDSETHCHAERCFLSWFCDDILSPNTNYQVTWYTSWSPCPECAGEVAEFLARHSNVNLTIFTARLYYFQDTDYQEGLRSLSQEGVAVKIMDYKDFKYCWENFVYNDDEPFKPWKGLKYNFRFLKRRLQEILE

SEQ ID NO: 5727 - protein, 202 aa, Macaca mulatta
MDGSPASRPRHLMDPNTFTFNFNNDLSVRGRHQTYLCYEVERLDNGTWVPMDERRGFLCNKAKNVPCGDYGCHVELRFLCEVPSWQLDPAQTYRVTWFISWSPCFRRGCAGQVRVFLQENKHVRLRIFAARIYDYDPLYQEALRTLRDAGAQVSIMTYEEFKHCWDTFVDRQGRPFQPWDGLDEHSQALSGRLRAILQNQGN

SEQ ID NO: 5728 - protein, 185 aa, Bos taurus
MDEYTFTENFNNQGWPSKTYLCYEMERLDGDATIPLDEYKGFVRNKGLDQPEKPCHAELYFLGKIHSWNLDRNQHYRLTCFISWSPCYDCAQKLTTFLKENHHISLHILASRIYTHNRFGCHQSGLCELQAAGARITIMTFEDFKHCWETFVDHKGKPFQPWEGLNVKSQALCTELQAILKTQQN

SEQ ID NO: 5729 - protein, 396 aa, Rattus rattus
MQPQGLGPNAGMGPVCLGCSHRRPYSPIRNPLKKLYQQTFYFHFKNVRYAWGRKNNFLCYEVNGMDCALPVPLRQGVFRKQGHIHAELCFIYWFHDKVLRVLSPMEEFKVTWYMSWSPCSKCAEQVARFLAAHRNLSLAIFSSRLYYYLRNPNYQQKLCRLIQEGVHVAAMDLPEFKKCWNKFVDNDGQPFRPWMRLRINFSFYDCKLQEIFSRMNLLREDVFYLQFNNSHRVKPVQNRYYRRKSYLCYQLERANGQEPLKGYLLYKKGEQHVEILFLEKMRSMELSQVRITCYLTWSPCPNCARQLAAFKKDHPDLILRIYTSRLYFYWRKKFQKGLCTLWRSGIHVDVMDLPQFADCWTNFVNPQRPFRPWNELEKNSWRIQRRLRRIKESWGL

SEQ ID NO: 5730 - protein, 227 aa, Bos taurus
DGWEVAFRSGTVLKAGVLGVSMTEGWAGSGHPGQGACVWTPGTRNTMNLLREVLFKQQFGNQPRVPAPYYRRKTYLCYQLKQRNDLTLDRGCFRNKKQRHAEIRFIDKINSLDLNPSQSYKIICYITWSPCPNCANELVNFITRNNHLKLEIFASRLYFHWIKSFKMGLQDLQNAGISVAVMTHTEFEDCWEQFVDNQSRPFQPWDKLEQYSASIRRRLQRILTAPI

SEQ ID NO: 5731 - protein, 490 aa, Pan troglodytes
MNPQIRNPMEWMYQRTFYYNFENEPILYGRSYTWLCYEVKIRRGHSNLLWDTGVFRGQMYSQPEHHAEMCFLSWFCGNQLSAYKCFQITWFVSWTPCPDCVAKLAKFLAEHPNVTLTISAARLYYYWERDYRRALCRLSQAGARVKIMDDEEFAYCWENFVYNEGQPFMPWYKFDDNYAFLHRTLKEIIRHLMDPDTFTFNFNNDPLVLRRHQTYLCYEVERLDNGTWVLMDQHMGFLCNEAKNLLCGFYGRHAELRFLDLVPSLQLDPAQIYRVTWFISWSPCFSWGCAGQVRAFLQENTHVRLRIFAARIYDYDPLYKEALQMLRDAGAQVSIMTYDEFEYCWDTFVYRQGCPFQPWDGLEEHSQALSGRLRAILQVRASSLCMVPHRPPPPPQSPGPCLPLCSEPPLGSLLPTGRPAPSLPFLLTASFSFPPPASLPPLPSLSLSPGHLPVPSFHSLTSCSIQPPCSSRIRETEGWASVSKEGRDLG

SEQ ID NO: 5732 - protein, 210 aa, Macaca mulatta
MALLTAKTFSLQFNNKRRVNKPYYPRKALLCYQLTPQNGSTPTRGHLKNKKKDHAEIRFINKIKSMGLDETQCYQVTCYLTWSPCPSCAGELVDFIKAHRHLNLRIFASRLYYHWRPNYQEGLLLLCGSQVPVEVMGLPEFTDCWENFVDHKEPPSFNPSEKLEELDKNSQAIKRRLERIKSRSVDVLENGLRSLQLGPVTPSSSIRNSR

SEQ ID NO: 5733 - protein, 224 aa, Homo sapiens
MAQKEEAAVATEAASQNGEDLENLDDPEKLKELIELPPFEIVTGERLPANFFKFQFRNVEYSSGRNKTFLCYVVEAQGKGGQVQASRGYLEDEHAAAHAEEAFFNTILPAFDPALRYNVTWYVSSSPCAACADRIIKTLSKTKNLRLLILVGRLFMWEEPEIQAALKKLKEAGCKLRIMKPQDFEYVWQNFVEQEEGESKAFQPWEDIQENFLYYEEKLADILK

SEQ ID NO: 5734 - protein, 224 aa, Mus musculus
MAQKEEAAEAAAPASQNGDDLENLEDPEKLKELIDLPPFEIVTGVRLPVNFFKFQFRNVEYSSGRNKTFLCYVVEVQSKGGQAQATQGYLEDEHAGAHAEEAFFNTILPAFDPALKYNVTWYVSSSPCAACADRILKTLSKTKNLRLLILVSRLFMWEEPEVQAALKKLKEAGCKLRIMKPQDFEYIWQNFVEQEEGESKAFEPWEDIQENFLYYEEKLADILK

SEQ ID NO: 5735 - protein, 224 aa, Rattus rattus
MAQKEEAAEAAAPASQNGDDLENLEDPEKLKELIDLPPFEIVTGVRLPVNFFKFQFRNVEYSSGRNKTFLCYVVEAQSKGGQVQATQGYLEDEHAGAHAEEAFFNTILPAFDPALKYNVTWYVSSSPCAACADRILKTLSKTKNLRLLILVSRLFMWEEPEVQAALKKLKEAGCKLRIMKPQDFEYLWQNFVEQEEGESKAFEPWEDIQENFLYYEEKLADILK

SEQ ID NO: 5736 - protein, 224 aa, Bos taurus
MAQKEEAAAAAEPASQNGEEVENLEDPEKLKELIELPPFEIVTGERLPAHYFKFQFRNVEYSSGRNKTFLCYVVEAQSKGGQVQASRGYLEDEHATNHAEEAFFNSIMPTFDPALRYMVTWYVSSSPCAACADRIVKTLNKTKNLRLLILVGRLFMWEEPEIQAALRKLKEAGCRLRIMKPQDFEYIWQNFVEQEEGESKAFEPWEDIQENFLYYEEKLADILK

SEQ ID NO: 5737 - protein, 1629 aa, synthetic construct
  REGION 1..1629: note = Synthetic Polypeptide
MTSEKGPSTGDPTLRRRIEPWEFDVFYDPRELRKEACLLYEIKWGMSRKIWRSSGKNTTNHVEVNFIKKFTSERDFHPSMSCSITWFLSWSPCWECSQAIREFLSRHPGVTLVIYVARLFWHMDQQNRQGLRDLVNSGVTIQIMRASEYYHCWRNFVNYPPGDEAHWPQYPPLWMMLYALELHCIILSLPPCLKISRRWQNHLTFFRLHLQNCHYQTIPPHILLATGLIHPSVAWRGSETPGTSESATPESDKKYSIGLAIGTNSVGWAVITDEYKVPSKKFKVLGNTDRHSIKKNLIGALLFDSGETAEATRLKRTARRRYTRRKNRICYLQEIFSNEMAKVDDSFFHRLEESFLVEEDKKHERHPIFGNIVDEVAYHEKYPTIYHLRKKLVDSTDKADLRLIYLALAHMIKFRGHFLIEGDLNPDNSDVDKLFIQLVQTYNQLFEENPINASGVDAKAILSARLSKSRRLENLIAQLPGEKKNGLFGNLIALSLGLTPNFKSNFDLAEDAKLQLSKDTYDDDLDNLLAQIGDQYADLFLAAKNLSDAILLSDILRVNTEITKAPLSASMIKRYDEHHQDLTLLKALVRQQLPEKYKEIFFDQSKNGYAGYIDGGASQEEFYKFIKPILEKMDGTEELLVKLNREDLLRKQRTFDNGSIPHQIHLGELHAILRRQEDFYPFLKDNREKIEKILTFRIPYYVGPLARGNSRFAWMTRKSEETITPWNFEEVVDKGASAQSFIERMTNFDKNLPNEKVLPKHSLLYEYFTVYNELTKVKYVTEGMRKPAFLSGEQKKAIVDLLFKTNRKVTVKQLKEDYFKKIECFDSVEISGVEDRFNASLGTYHDLLKIIKDKDFLDNEENEDILEDIVLTLTLFEDREMIEERLKTYAHLFDDKVMKQLKRRRYTGWGRLSRKLINGIRDKQSGKTILDFLKSDGFANRNFMQLIHDDSLTFKEDIQKAQVSGQGDSLHEHIANLAGSPAIKKGILQTVKVVDELVKVMGRHKPENIVIEMARENQTTQKGQKNSRERMKRIEEGIKELGSQILKEHPVENTQLQNEKLYLYYLQNGRDMYVDQELDINRLSDYDVDAIVPQSFLKDDSIDNKVLTRSDKNRGKSDNVPSEEVVKKMKNYWRQLLNAKLITQRKFDNLTKAERGGLSELDKAGFIKRQLVETRQITKHVAQILDSRMNTKYDENDKLIREVKVITLKSKLVSDFRKDFQFYKVREINNYHHAHDAYLNAVVGTALIKKYPKLESEFVYGDYKVYDVRKMIAKSEQEIGKATAKYFFYSNIMNFFKTEITLANGEIRKRPLIETNGETGEIVWDKGRDFATVRKVLSMPQVNIVKKTEVQTGGFSKESILPKRNSDKLIARKKDWDPKKYGGFDSPTVAYSVLVVAKVEKGKSKKLKSVKELLGITIMERSSFEKNPIDFLEAKGYKEVKKDLIIKLPKYSLFELENGRKRMLASAGELQKGNELALPSKYVNFLYLASHYEKLKGSPEDNEQKQLFVEQHKHYLDEIIEQISEFSKRVILADANLDKVLSAYNKHRDKPIREQAENIIHLFTLTNLGAPAAFKYFDTTIDRKRYTSTKEVLDATLIHQSITGLYETRIDLSQLGGDSGGSPKKKRKV

SEQ ID NO: 5738 - protein, 208 aa, Petromyzon marinus; identical to SEQ ID NO: 609

SEQ ID NO: 5739 - protein, 384 aa, synthetic construct
  REGION 1..384: note = Synthetic Polypeptide
MKPHFRNTVERMYRDTFSYNFYNRPILSRRNTVWLCYEVKTKGPSRPPLDAKIFRGQVYSELKYHPEMRFFHWFSKWRKLHRDQEYEVTWYISWSPCTKCTRDMATFLAEDPKVTLTIFVARLYYFWDPDYQEALRSLCQKRDGPRATMKIMNYDEFQHCWSKFVYSQRELFEPWNNLPKYYILLHIMLGEILRHSMDPPTFTFNFNNEPWVRGRHETYLCYEVERMHNDTWVLLNQRRGFLCNQAPHKHGFLEGRHAELCFLDVIPFWKLDLDQDYRVTCFTSWSPCFSCAQEMAKFISKNKHVSLCIFTARIYRRQGRCQEGLRTLAEAGAKISIMTYSEFKHCWDTFVDHQGCPFQPWDGLDEHSQDLSGRLRAILQNQEN

SEQ ID NO: 5740 - protein, 184 aa, Homo sapiens
MDPPTFTFNFNNEPWVRGRHETYLCYEVERMHNDTWVLLNQRRGFLCNQAPHKHGFLEGRHAELCFLDVIPFWKLDLDQDYRVTCFTSWSPCFSCAQEMAKFISKNKHVSLCIFTARIYDDQGRCQEGLRTLAEAGAKISIMTYSEFKHCWDTFVDHQGCPFQPWDGLDEHSQDLSGRLRAILQ

SEQ ID NO: 5741 - protein, 184 aa, synthetic construct
  REGION 1..184: note = Synthetic Polypeptide
MDPPTFTFNFNNEPWVRGRHETYLCYEVERMHNDTWVLLNQRRGFLCNQAPHKHGFLEGRHAELCFLDVIPFWKLDLDQDYRVTCFTSWSPCFSCAQEMAKFISKNKHVSLCIFTARIYRRQGRCQEGLRTLAEAGAKISIMTYSEFKHCWDTFVDHQGCPFQPWDGLDEHSQDLSGRLRAILQ

SEQ ID NO: 5742 - protein, 1679 aa, synthetic construct
  REGION 1..1679: note = Synthetic Polypeptide
MTDAEYVRIHEKLDIYTFKKQFFNNKKSVSHRCYVLFELKRRGERRACFWGYAVNKPQSGTERGIHAEIFSIRKVEEYLRDNPGQFTINWYSSWSPCADCAEKILEWYNQELRGNGHTLKIWACKLYYEKNARNQIGLWNLRDNGVGLNVMVSEHYQCCRKIFIQSSHNQLNENRWLEKTLKRAEKRRSELSIMIQVKILHTTKSPAVSGSETPGTSESATPESDKKYSIGLAIGTNSVGWAVITDEYKVPSKKFKVLGNTDRHSIKKNLIGALLFDSGETAEATRLKRTARRRYTRRKNRICYLQEIFSNEMAKVDDSFFHRLEESFLVEEDKKHERHPIFGNIVDEVAYHEKYPTIYHLRKKLVDSTDKADLRLIYLALAHMIKFRGHFLIEGDLNPDNSDVDKLFIQLVQTYNQLFEENPINASGVDAKAILSARLSKSRRLENLIAQLPGEKKNGLFGNLIALSLGLTPNFKSNFDLAEDAKLQLSKDTYDDDLDNLLAQIGDQYADLFLAAKNLSDAILLSDILRVNTEITKAPLSASMIKRYDEHHQDLTLLKALVRQQLPEKYKEIFFDQSKNGYAGYIDGGASQEEFYKFIKPILEKMDGTEELLVKLNREDLLRKQRTFDNGSIPHQIHLGELHAILRRQEDFYPFLKDNREKIEKILTFRIPYYVGPLARGNSRFAWMTRKSEETITPWNFEEVVDKGASAQSFIERMTNFDKNLPNEKVLPKHSLLYEYFTVYNELTKVKYVTEGMRKPAFLSGEQKKAIVDLLFKTNRKVTVKQLKEDYFKKIECFDSVEISGVEDRFNASLGTYHDLLKIIKDKDFLDNEENEDILEDIVLTLTLFEDREMIEERLKTYAHLFDDKVMKQLKRRRYTGWGRLSRKLINGIRDKQSGKTILDFLKSDGFANRNFMQLIHDDSLTFKEDIQKAQVSGQGDSLHEHIANLAGSPAIKKGILQTVKVVDELVKVMGRHKPENIVIEMARENQTTQKGQKNSRERMKRIEEGIKELGSQILKEHPVENTQLQNEKLYLYYLQNGRDMYVDQELDINRLSDYDVDAIVPQSFLKDDSIDNKVLTRSDKNRGKSDNVPSEEVVKKMKNYWRQLLNAKLITQRKFDNLTKAERGGLSELDKAGFIKRQLVETRQITKHVAQILDSRMNTKYDENDKLIREVKVITLKSKLVSDFRKDFQFYKVREINNYHHAHDAYLNAVVGTALIKKYPKLESEFVYGDYKVYDVRKMIAKSEQEIGKATAKYFFYSNIMNFFKTEITLANGEIRKRPLIETNGETGEIVWDKGRDFATVRKVLSMPQVNIVKKTEVQTGGFSKESILPKRNSDKLIARKKDWDPKKYGGFDSPTVAYSVLVVAKVEKGKSKKLKSVKELLGITIMERSSFEKNPIDFLEAKGYKEVKKDLIIKLPKYSLFELENGRKRMLASAGELQKGNELALPSKYVNFLYLASHYEKLKGSPEDNEQKQLFVEQHKHYLDEIIEQISEFSKRVILADANLDKVLSAYNKHRDKPIREQAENIIHLFTLTNLGAPAAFKYFDTTIDRKRYTSTKEVLDATLIHQSITGLYETRIDLSQLGGDSGGSMTNLSDIIEKETGKQLVIQESILMLPEEVEEVIGNKPESDILVHTAYDESTDENVMLLTSDAPEYKPWALVIQDSNGENKIKML

SEQ ID NO: 5743 - protein, 1689 aa, synthetic construct
  REGION 1..1689: note = Synthetic Polypeptide
MTDAEYVRIHEKLDIYTFKKQFFNNKKSVSHRCYVLFELKRRGERRACFWGYAVNKPQSGTERGIHAEIFSIRKVEEYLRDNPGQFTINWYSSWSPCADCAEKILEWYNQELRGNGHTLKIWACKLYYEKNARNQIGLWNLRDNGVGLNVMVSEHYQCCRKIFIQSSHNQLNENRWLEKTLKRAEKRRSELSIMIQVKILHTTKSPAVSGSETPGTSESATPESDKKYSIGLAIGTNSVGWAVITDEYKVPSKKFKVLGNTDRHSIKKNLIGALLFDSGETAEATRLKRTARRRYTRRKNRICYLQEIFSNEMAKVDDSFFHRLEESFLVEEDKKHERHPIFGNIVDEVAYHEKYPTIYHLRKKLVDSTDKADLRLIYLALAHMIKFRGHFLIEGDLNPDNSDVDKLFIQLVQTYNQLFEENPINASGVDAKAILSARLSKSRRLENLIAQLPGEKKNGLFGNLIALSLGLTPNFKSNFDLAEDAKLQLSKDTYDDDLDNLLAQIGDQYADLFLAAKNLSDAILLSDILRVNTEITKAPLSASMIKRYDEHHQDLTLLKALVRQQLPEKYKEIFFDQSKNGYAGYIDGGASQEEFYKFIKPILEKMDGTEELLVKLNREDLLRKQRTFDNGSIPHQIHLGELHAILRRQEDFYPFLKDNREKIEKILTFRIPYYVGPLARGNSRFAWMTRKSEETITPWNFEEVVDKGASAQSFIERMTNFDKNLPNEKVLPKHSLLYEYFTVYNELTKVKYVTEGMRKPAFLSGEQKKAIVDLLFKTNRKVTVKQLKEDYFKKIECFDSVEISGVEDRFNASLGTYHDLLKIIKDKDFLDNEENEDILEDIVLTLTLFEDREMIEERLKTYAHLFDDKVMKQLKRRRYTGWGRLSRKLINGIRDKQSGKTILDFLKSDGFANRNFMQLIHDDSLTFKEDIQKAQVSGQGDSLHEHIANLAGSPAIKKGILQTVKVVDELVKVMGRHKPENIVIEMARENQTTQKGQKNSRERMKRIEEGIKELGSQILKEHPVENTQLQNEKLYLYYLQNGRDMYVDQELDINRLSDYDVDHIVPQSFLKDDSIDNKVLTRSDKNRGKSDNVPSEEVVKKMKNYWRQLLNAKLITQRKFDNLTKAERGGLSELDKAGFIKRQLVETRQITKHVAQILDSRMNTKYDENDKLIREVKVITLKSKLVSDFRKDFQFYKVREINNYHHAHDAYLNAVVGTALIKKYPKLESEFVYGDYKVYDVRKMIAKSEQEIGKATAKYFFYSNIMNFFKTEITLANGEIRKRPLIETNGETGEIVWDKGRDFATVRKVLSMPQVNIVKKTEVQTGGFSKESILPKRNSDKLIARKKDWDPKKYGGFDSPTVAYSVLVVAKVEKGKSKKLKSVKELLGITIMERSSFEKNPIDFLEAKGYKEVKKDLIIKLPKYSLFELENGRKRMLASAGELQKGNELALPSKYVNFLYLASHYEKLKGSPEDNEQKQLFVEQHKHYLDEIIEQISEFSKRVILADANLDKVLSAYNKHRDKPIREQAENIIHLFTLTNLGAPAAFKYFDTTIDRKRYTSTKEVLDATLIHQSITGLYETRIDLSQLGGDSGGSTNLSDIIEKETGKQLVIQESILMLPEEVEEVIGNKPESDILVHTAYDESTDENVMLLTSDAPEYKPWALVIQDSNGENKIKMLSGGSPKKKRKV

SEQ ID NO: 5744 - protein, 1655 aa, synthetic construct
  REGION 1..1655: note = Synthetic Polypeptide
MDPPTFTFNFNNEPWVRGRHETYLCYEVERMHNDTWVLLNQRRGFLCNQAPHKHGFLEGRHAELCFLDVIPFWKLDLDQDYRVTCFTSWSPCFSCAQEMAKFISKNKHVSLCIFTARIYDDQGRCQEGLRTLAEAGAKISIMTYSEFKHCWDTFVDHQGCPFQPWDGLDEHSQDLSGRLRAILQSGSETPGTSESATPESDKKYSIGLAIGTNSVGWAVITDEYKVPSKKFKVLGNTDRHSIKKNLIGALLFDSGETAEATRLKRTARRRYTRRKNRICYLQEIFSNEMAKVDDSFFHRLEESFLVEEDKKHERHPIFGNIVDEVAYHEKYPTIYHLRKKLVDSTDKADLRLIYLALAHMIKFRGHFLIEGDLNPDNSDVDKLFIQLVQTYNQLFEENPINASGVDAKAILSARLSKSRRLENLIAQLPGEKKNGLFGNLIALSLGLTPNFKSNFDLAEDAKLQLSKDTYDDDLDNLLAQIGDQYADLFLAAKNLSDAILLSDILRVNTEITKAPLSASMIKRYDEHHQDLTLLKALVRQQLPEKYKEIFFDQSKNGYAGYIDGGASQEEFYKFIKPILEKMDGTEELLVKLNREDLLRKQRTFDNGSIPHQIHLGELHAILRRQEDFYPFLKDNREKIEKILTFRIPYYVGPLARGNSRFAWMTRKSEETITPWNFEEVVDKGASAQSFIERMTNFDKNLPNEKVLPKHSLLYEYFTVYNELTKVKYVTEGMRKPAFLSGEQKKAIVDLLFKTNRKVTVKQLKEDYFKKIECFDSVEISGVEDRFNASLGTYHDLLKIIKDKDFLDNEENEDILEDIVLTLTLFEDREMIEERLKTYAHLFDDKVMKQLKRRRYTGWGRLSRKLINGIRDKQSGKTILDFLKSDGFANRNFMQLIHDDSLTFKEDIQKAQVSGQGDSLHEHIANLAGSPAIKKGILQTVKVVDELVKVMGRHKPENIVIEMARENQTTQKGQKNSRERMKRIEEGIKELGSQILKEHPVENTQLQNEKLYLYYLQNGRDMYVDQELDINRLSDYDVDAIVPQSFLKDDSIDNKVLTRSDKNRGKSDNVPSEEVVKKMKNYWRQLLNAKLITQRKFDNLTKAERGGLSELDKAGFIKRQLVETRQITKHVAQILDSRMNTKYDENDKLIREVKVITLKSKLVSDFRKDFQFYKVREINNYHHAHDAYLNAVVGTALIKKYPKLESEFVYGDYKVYDVRKMIAKSEQEIGKATAKYFFYSNIMNFFKTEITLANGEIRKRPLIETNGETGEIVWDKGRDFATVRKVLSMPQVNIVKKTEVQTGGFSKESILPKRNSDKLIARKKDWDPKKYGGFDSPTVAYSVLVVAKVEKGKSKKLKSVKELLGITIMERSSFEKNPIDFLEAKGYKEVKKDLIIKLPKYSLFELENGRKRMLASAGELQKGNELALPSKYVNFLYLASHYEKLKGSPEDNEQKQLFVEQHKHYLDEIIEQISEFSKRVILADANLDKVLSAYNKHRDKPIREQAENIIHLFTLTNLGAPAAFKYFDTTIDRKRYTSTKEVLDATLIHQSITGLYETRIDLSQLGGDSGGSMTNLSDIIEKETGKQLVIQESILMLPEEVEEVIGNKPESDILVHTAYDESTDENVMLLTSDAPEYKPWALVIQDSNGENKIKML

SEQ ID NO: 5745 - protein, 1665 aa, synthetic construct
  REGION 1..1665: note = Synthetic Polypeptide
MDPPTFTFNFNNEPWVRGRHETYLCYEVERMHNDTWVLLNQRRGFLCNQAPHKHGFLEGRHAELCFLDVIPFWKLDLDQDYRVTCFTSWSPCFSCAQEMAKFISKNKHVSLCIFTARIYDDQGRCQEGLRTLAEAGAKISIMTYSEFKHCWDTFVDHQGCPFQPWDGLDEHSQDLSGRLRAILQSGSETPGTSESATPESDKKYSIGLAIGTNSVGWAVITDEYKVPSKKFKVLGNTDRHSIKKNLIGALLFDSGETAEATRLKRTARRRYTRRKNRICYLQEIFSNEMAKVDDSFFHRLEESFLVEEDKKHERHPIFGNIVDEVAYHEKYPTIYHLRKKLVDSTDKADLRLIYLALAHMIKFRGHFLIEGDLNPDNSDVDKLFIQLVQTYNQLFEENPINASGVDAKAILSARLSKSRRLENLIAQLPGEKKNGLFGNLIALSLGLTPNFKSNFDLAEDAKLQLSKDTYDDDLDNLLAQIGDQYADLFLAAKNLSDAILLSDILRVNTEITKAPLSASMIKRYDEHHQDLTLLKALVRQQLPEKYKEIFFDQSKNGYAGYIDGGASQEEFYKFIKPILEKMDGTEELLVKLNREDLLRKQRTFDNGSIPHQIHLGELHAILRRQEDFYPFLKDNREKIEKILTFRIPYYVGPLARGNSRFAWMTRKSEETITPWNFEEVVDKGASAQSFIERMTNFDKNLPNEKVLPKHSLLYEYFTVYNELTKVKYVTEGMRKPAFLSGEQKKAIVDLLFKTNRKVTVKQLKEDYFKKIECFDSVEISGVEDRFNASLGTYHDLLKIIKDKDFLDNEENEDILEDIVLTLTLFEDREMIEERLKTYAHLFDDKVMKQLKRRRYTGWGRLSRKLINGIRDKQSGKTILDFLKSDGFANRNFMQLIHDDSLTFKEDIQKAQVSGQGDSLHEHIANLAGSPAIKKGILQTVKVVDELVKVMGRHKPENIVIEMARENQTTQKGQKNSRERMKRIEEGIKELGSQILKEHPVENTQLQNEKLYLYYLQNGRDMYVDQELDINRLSDYDVDHIVPQSFLKDDSIDNKVLTRSDKNRGKSDNVPSEEVVKKMKNYWRQLLNAKLITQRKFDNLTKAERGGLSELDKAGFIKRQLVETRQITKHVAQILDSRMNTKYDENDKLIREVKVITLKSKLVSDFRKDFQFYKVREINNYHHAHDAYLNAVVGTALIKKYPKLESEFVYGDYKVYDVRKMIAKSEQEIGKATAKYFFYSNIMNFFKTEITLANGEIRKRPLIETNGETGEIVWDKGRDFATVRKVLSMPQVNIVKKTEVQTGGFSKESILPKRNSDKLIARKKDWDPKKYGGFDSPTVAYSVLVVAKVEKGKSKKLKSVKELLGITIMERSSFEKNPIDFLEAKGYKEVKKDLIIKLPKYSLFELENGRKRMLASAGELQKGNELALPSKYVNFLYLASHYEKLKGSPEDNEQKQLFVEQHKHYLDEIIEQISEFSKRVILADANLDKVLSAYNKHRDKPIREQAENIIHLFTLTNLGAPAAFKYFDTTIDRKRYTSTKEVLDATLIHQSITGLYETRIDLSQLGGDSGGSTNLSDIIEKETGKQLVIQESILMLPEEVEEVIGNKPESDILVHTAYDESTDENVMLLTSDAPEYKPWALVIQDSNGENKIKMLSGGSPKKKRKV

SEQ ID NO: 5746 - protein, 1665 aa, synthetic construct
  REGION 1..1665: note = Synthetic Polypeptide
MDPPTFTFNFNNEPWVRGRHETYLCYEVERMHNDTWVLLNQRRGFLCNQAPHKHGFLEGRHAELCFLDVIPFWKLDLDQDYRVTCFTSWSPCFSCAQEMAKFISKNKHVSLCIFTARIYRRQGRCQEGLRTLAEAGAKISIMTYSEFKHCWDTFVDHQGCPFQPWDGLDEHSQDLSGRLRAILQSGSETPGTSESATPESDKKYSIGLAIGTNSVGWAVITDEYKVPSKKFKVLGNTDRHSIKKNLIGALLFDSGETAEATRLKRTARRRYTRRKNRICYLQEIFSNEMAKVDDSFFHRLEESFLVEEDKKHERHPIFGNIVDEVAYHEKYPTIYHLRKKLVDSTDKADLRLIYLALAHMIKFRGHFLIEGDLNPDNSDVDKLFIQLVQTYNQLFEENPINASGVDAKAILSARLSKSRRLENLIAQLPGEKKNGLFGNLIALSLGLTPNFKSNFDLAEDAKLQLSKDTYDDDLDNLLAQIGDQYADLFLAAKNLSDAILLSDILRVNTEITKAPLSASMIKRYDEHHQDLTLLKALVRQQLPEKYKEIFFDQSKNGYAGYIDGGASQEEFYKFIKPILEKMDGTEELLVKLNREDLLRKQRTFDNGSIPHQIHLGELHAILRRQEDFYPFLKDNREKIEKILTFRIPYYVGPLARGNSRFAWMTRKSEETITPWNFEEVVDKGASAQSFIERMTNFDKNLPNEKVLPKHSLLYEYFTVYNELTKVKYVTEGMRKPAFLSGEQKKAIVDLLFKTNRKVTVKQLKEDYFKKIECFDSVEISGVEDRFNASLGTYHDLLKIIKDKDFLDNEENEDILEDIVLTLTLFEDREMIEERLKTYAHLFDDKVMKQLKRRRYTGWGRLSRKLINGIRDKQSGKTILDFLKSDGFANRNFMQLIHDDSLTFKEDIQKAQVSGQGDSLHEHIANLAGSPAIKKGILQTVKVVDELVKVMGRHKPENIVIEMARENQTTQKGQKNSRERMKRIEEGIKELGSQILKEHPVENTQLQNEKLYLYYLQNGRDMYVDQELDINRLSDYDVDHIVPQSFLKDDSIDNKVLTRSDKNRGKSDNVPSEEVVKKMKNYWRQLLNAKLITQRKFDNLTKAERGGLSELDKAGFIKRQLVETRQITKHVAQILDSRMNTKYDENDKLIREVKVITLKSKLVSDFRKDFQFYKVREINNYHHAHDAYLNAVVGTALIKKYPKLESEFVYGDYKVYDVRKMIAKSEQEIGKATAKYFFYSNIMNFFKTEITLANGEIRKRPLIETNGETGEIVWDKGRDFATVRKVLSMPQVNIVKKTEVQTGGFSKESILPKRNSDKLIARKKDWDPKKYGGFDSPTVAYSVLVVAKVEKGKSKKLKSVKELLGITIMERSSFEKNPIDFLEAKGYKEVKKDLIIKLPKYSLFELENGRKRMLASAGELQKGNELALPSKYVNFLYLASHYEKLKGSPEDNEQKQLFVEQHKHYLDEIIEQISEFSKRVILADANLDKVLSAYNKHRDKPIREQAENIIHLFTLTNLGAPAAFKYFDTTIDRKRYTSTKEVLDATLIHQSITGLYETRIDLSQLGGDSGGSTNLSDIIEKETGKQLVIQESILMLPEEVEEVIGNKPESDILVHTAYDESTDENVMLLTSDAPEYKPWALVIQDSNGENKIKMLSGGSPKKKRKV

SEQ ID NO: 5747 - DNA, 23 bp, synthetic construct
  misc_feature 1..23: note = Synthetic Polynucleotide
  source 1..23: mol_type = other DNA
gaagcgcctggcagtgtaccagg

SEQ ID NO: 5748 - DNA, 23 bp, synthetic construct
  misc_feature 1..23: note = Synthetic Polynucleotide
  source 1..23: mol_type = other DNA
ccactacaactacatgtgtgaca

SEQ ID NO: 5749 - DNA, 23 bp, synthetic construct
  misc_feature 1..23: note = Synthetic Polynucleotide
  source 1..23: mol_type = other DNA
ccgcgccatggccatctgcaagc

SEQ ID NO: 5750 - DNA, 24 bp, synthetic construct
  misc_feature 1..24: note = Synthetic Polynucleotide
  source 1..24: mol_type = other DNA
tcgcacccgtggatttatttatgg

SEQ ID NO: 5751 - DNA, 24 bp, synthetic construct
  misc_feature 1..24: note = Synthetic Polynucleotide
  source 1..24: mol_type = other DNA
ttcgcacccgtggatttattatgg

SEQ ID NO: 5752 - DNA, 24 bp, synthetic construct
  misc_feature 1..24: note = Synthetic Polynucleotide
  source 1..24: mol_type = other DNA
cctcgcacgtggatttatttatgg

SEQ ID NO: 5753 - DNA, 24 bp, synthetic construct
  misc_feature 1..24: note = Synthetic Polynucleotide
  source 1..24: mol_type = other DNA
tcctcgcacgtggatttattatgg

SEQ ID NO: 5754 - DNA, 24 bp, synthetic construct
  misc_feature 1..24: note = Synthetic Polynucleotide
  source 1..24: mol_type = other DNA
accctcgcgtggatttatttatgg

SEQ ID NO: 5755 - DNA, 24 bp, synthetic construct
  misc_feature 1..24: note = Synthetic Polynucleotide
  source 1..24: mol_type = other DNA
taccctcgcgtggatttattatgg

SEQ ID NO: 5756 - DNA, 24 bp, synthetic construct
  misc_feature 1..24: note = Synthetic Polynucleotide
  source 1..24: mol_type = other DNA
gcaccctcgtggatttatttatgg

SEQ ID NO: 5757 - DNA, 24 bp, synthetic construct
  misc_feature 1..24: note = Synthetic Polynucleotide
  source 1..24: mol_type = other DNA
tgcaccctcgtggatttattatgg

SEQ ID NO: 5758-5759 - skipped (2 entries)

SEQ ID NO: 5760 - DNA, 24 bp, synthetic construct
  misc_feature 1..24: note = Synthetic Polynucleotide
  source 1..24: mol_type = other DNA
ggaggacgtgcgcggccgccttgg

SEQ ID NO: 5761 - DNA, 23 bp, synthetic construct
  misc_feature 1..23: note = Synthetic Polynucleotide
  source 1..23: mol_type = other DNA
ctgtggcagtggcaccagaatgg

SEQ ID NO: 5762 - DNA, 23 bp, synthetic construct
  misc_feature 1..23: note = Synthetic Polynucleotide
  source 1..23: mol_type = other DNA
cctcccggccggcggtatccagg

SEQ ID NO: 5763 - DNA, 23 bp, synthetic construct
  misc_feature 1..23: note = Synthetic Polynucleotide
  source 1..23: mol_type = other DNA
gcttgcagatggccatggcgcgg

SEQ ID NO: 5764 - DNA, 24 bp, synthetic construct
  misc_feature 1..24: note = Synthetic Polynucleotide
  source 1..24: mol_type = other DNA
acacatgcagttgtagtgggatgg

SEQ ID NO: 5765 - DNA, 23 bp, synthetic construct
  misc_feature 1..23: note = Synthetic Polynucleotide
  source 1..23: mol_type = other DNA
tgtcacacatgtagttgtagtgg

SEQ ID NO: 5766 - DNA, 23 bp, synthetic construct
  misc_feature 1..23: note = Synthetic Polynucleotide
  source 1..23: mol_type = other DNA
ttccccccccgatttatttatgg

SEQ ID NO: 5767 - DNA, 23 bp, synthetic construct
  misc_feature 1..23: note = Synthetic Polynucleotide
  source 1..23: mol_type = other DNA
gagttagagcagaagaagaaagg

SEQ ID NO: 5768 - DNA, 23 bp, synthetic construct
  misc_feature 1..23: note = Synthetic Polynucleotide
  source 1..23: mol_type = other DNA
gagtctaagcagaagaagaagag

SEQ ID NO: 5769 - DNA, 23 bp, synthetic construct
  misc_feature 1..23: note = Synthetic Polynucleotide
  source 1..23: mol_type = other DNA
gaggccgagcagaagaaagacgg

SEQ ID NO: 5770 - DNA, 23 bp, synthetic construct
  misc_feature 1..23: note = Synthetic Polynucleotide
  source 1..23: mol_type = other DNA
gagtcctagcaggagaagaagag

SEQ ID NO: 5771 - DNA, 23 bp, synthetic construct
  misc_feature 1..23: note = Synthetic Polynucleotide
  source 1..23: mol_type = other DNA
gagtccgggaaggagaagaaagg

SEQ ID NO: 5772 - DNA, 23 bp, synthetic construct
  misc_feature 1..23: note = Synthetic Polynucleotide
  source 1..23: mol_type = other DNA
gagccggagcagaagaaggaggg

SEQ ID NO: 5773 - DNA, 23 bp, synthetic construct
  misc_feature 1..23: note = Synthetic Polynucleotide
  source 1..23: mol_type = other DNA
aagtccgaggagaggaagaaagg

SEQ ID NO: 5774 - DNA, 23 bp, synthetic construct
  misc_feature 1..23: note = Synthetic Polynucleotide
  source 1..23: mol_type = other DNA
gaatccaagcaggagaagaagga

SEQ ID NO: 5775 - DNA, 23 bp, synthetic construct
  misc_feature 1..23: note = Synthetic Polynucleotide
  source 1..23: mol_type = other DNA
acgtctgagcagaagaagaatgg

SEQ ID NO: 5776 - DNA, 23 bp, synthetic construct
  misc_feature 1..23: note = Synthetic Polynucleotide
  source 1..23: mol_type = other DNA
ggaaccccgtctgcagcaccagg

SEQ ID NO: 5777 - DNA, 23 bp, synthetic construct
  misc_feature 1..23: note = Synthetic Polynucleotide
  source 1..23: mol_type = other DNA
ggagtccctcctacagcaccagg

SEQ ID NO: 5778 - DNA, 23 bp, synthetic construct
  misc_feature 1..23: note = Synthetic Polynucleotide
  source 1..23: mol_type = other DNA
agaggcccctctgcagcaccagg

SEQ ID NO: 5779 - DNA, 23 bp, synthetic construct
  misc_feature 1..23: note = Synthetic Polynucleotide
  source 1..23: mol_type = other DNA
accatccctcctgcagcaccagg

SEQ ID NO: 5780 - DNA, 23 bp, synthetic construct
  misc_feature 1..23: note = Synthetic Polynucleotide
  source 1..23: mol_type = other DNA
ggattgccatccgcagcacctgg

SEQ ID NO: 5781 - DNA, 23 bp, synthetic construct
  misc_feature 1..23: note = Synthetic Polynucleotide
  source 1..23: mol_type = other DNA
tgaatcccatctccagcaccagg

SEQ ID NO: 5782 - DNA, 23 bp, synthetic construct
  misc_feature 1..23: note = Synthetic Polynucleotide
  source 1..23: mol_type = other DNA
ggagtccctcctgcagcacctga

SEQ ID NO: 5783 - DNA, 23 bp, synthetic construct
  misc_feature 1..23: note = Synthetic Polynucleotide
  source 1..23: mol_type = other DNA
gtggctggaggtggaggtggggg

SEQ ID NO: 5784 - DNA, 23 bp, synthetic construct
  misc_feature 1..23: note = Synthetic Polynucleotide
  source 1..23: mol_type = other DNA
gagggaagggctggaggtggagg

SEQ ID NO: 5785 - DNA, 60 bp, synthetic construct
  misc_feature 1..60: note = Synthetic Polynucleotide
  source 1..60: mol_type = other DNA
agcattctgccgacatggaagccgtcgcatatggtgtggtgcacctggatggccagcggc

SEQ ID NO: 5786 - DNA, 60 bp, synthetic construct
  misc_feature 1..60: note = Synthetic Polynucleotide
  source 1..60: mol_type = other DNA
agcattctgccgacatggaagccgtcgcatacggcgcggtgcacctggatggccagcggc

SEQ ID NO: 5787 - protein, 20 aa, synthetic construct
  REGION 1..20: note = Synthetic Polypeptide
LMRGVHFGDCITHHVQIALP

SEQ ID NO: 5788 - protein, 20 aa, synthetic construct
  REGION 1..20: note = Synthetic Polypeptide
LMRGVHFGDCVARHVQIALP

SEQ ID NO: 5789 - protein, 6 aa, synthetic construct
  REGION 1..6: note = Synthetic Polypeptide
  VARIANT 2: note = X is Cysteine or Arginine
KXLAYQ

SEQ ID NO: 5790 - DNA, 20 bp, synthetic construct
  misc_feature 1..20: note = Synthetic Polynucleotide
  source 1..20: mol_type = other DNA
gaagcgcctggcagtgtacc

SEQ ID NO: 5791 - protein, 7 aa, synthetic construct
  REGION 1..7: note = Synthetic Polypeptide
  VARIANT 3: note = X is Arginine or STOP
GSXYPGE

SEQ ID NO: 5792 - DNA, 23 bp, synthetic construct
  misc_feature 1..23: note = Synthetic Polynucleotide
  source 1..23: mol_type = other DNA
tgcccctccctccctggcccagg

SEQ ID NO: 5793 - DNA, 23 bp, synthetic construct
  misc_feature 1..23: note = Synthetic Polynucleotide
  source 1..23: mol_type = other DNA
agagccccccctcaaagagaggg

SEQ ID NO: 5794 - DNA, 23 bp, synthetic construct
  misc_feature 1..23: note = Synthetic Polynucleotide
  source 1..23: mol_type = other DNA
ttttcctcccccccacaggtaga

SEQ ID NO: 5795 - DNA, 23 bp, synthetic construct
  misc_feature 1..23: note = Synthetic Polynucleotide
  source 1..23: mol_type = other DNA
gccccccctcaaagagagggtgg

SEQ ID NO: 5796 - DNA, 26 bp, synthetic construct
  misc_feature 1..26: note = Synthetic Polynucleotide
  source 1..26: mol_type = other DNA
gatgttccaatcagtacgcagagagt

SEQ ID NO: 5797 - DNA, 26 bp, synthetic construct
  misc_feature 1..26: note = Synthetic Polynucleotide
  source 1..26: mol_type = other DNA
cttctccagccctggcctgggtcaat

SEQ ID NO: 5798 - DNA, 24 bp, synthetic construct
  misc_feature 1..24: note = Synthetic Polynucleotide
  source 1..24: mol_type = other DNA
gccgtctccaaggtgaaagcggaa

SEQ ID NO: 5799 - DNA, 24 bp, synthetic construct
  misc_feature 1..24: note = Synthetic Polynucleotide
  source 1..24: mol_type = other DNA
gtcgccgtctccaaggtgaaagcg

SEQ ID NO: 5800 - DNA, 24 bp, synthetic construct
  misc_feature 1..24: note = Synthetic Polynucleotide
  source 1..24: mol_type = other DNA
ggtgcattttcaggaggaagcgat

SEQ ID NO: 5801 - DNA, 26 bp, synthetic construct
  misc_feature 1..26: note = Synthetic Polynucleotide
  source 1..26: mol_type = other DNA
gccgtctccaaggtgaaagcggaagt

SEQ ID NO: 5802 - DNA, 142 bp, synthetic construct
  misc_feature 1..142: note = Synthetic Polynucleotide
  source 1..142: mol_type = other DNA
tttcactatgggcaaatattatacgcaaggcgacaaggtgctgatgccgctggccatccaggtgcaccacgccgtatgcgacggcttccatgtcggcagaatgcttaatgaattacaacagtactgcgatgagtggcagggc

SEQ ID NO: 5803 - protein, 47 aa, synthetic construct
  REGION 1..47: note = Synthetic Polypeptide
FTMGKYYTQGDKVLMPLAIQVHHAVCDGFHVGRMLNELQQYCDEWQG

SEQ ID NO: 5804 - DNA, 142 bp, synthetic construct
  misc_feature 1..142: note = Synthetic Polynucleotide
  source 1..142: mol_type = other DNA
tttcactatgggcaaatattatacgcaaggcgacaaggtgctgatgccgctggccatccaggtgcaccgcgccgtatgcgacggcttccatgtcggcagaatgcttaatgaattacaacagtactgcgatgagtggcagggc

SEQ ID NO: 5805 - protein, 47 aa, synthetic construct
  REGION 1..47: note = Synthetic Polypeptide
FTMGKYYTQGDKVLMPLAIQVHRAVCDGFHVGRMLNELQQYCDEWQG

SEQ ID NO: 5806 - DNA, 40 bp, synthetic construct
  misc_feature 1..40: note = Synthetic Polynucleotide
  source 1..40: mol_type = other DNA
gccgtcgcatatggtgtggtgcacctggatggccagcggc

SEQ ID NO: 5807 - protein, 1300 aa, synthetic construct
  REGION 1..1300: note = Synthetic Polypeptide
MSIYQEFVNKYSLSKTLRFELIPQGKTLENIKARGLILDDEKRAKDYKKAKQIIDKYHQFFIEEILSSVCISEDLLQNYSDVYFKLKKSDDDNLQKDFKSAKDTIKKQISEYIKDSEKFKNLFNQNLIDAKKGQESDLILWLKQSKDNGIELFKANSDITDIDEALEIIKSFKGWTTYFKGFHENRKNVYSSNDIPTSIIYRIVDDNLPKFLENKAKYESLKDKAPEAINYEQIKKDLAEELTFDIDYKTSEVNQRVFSLDEVFEIANFNNYLNQSGITKFNTIIGGKFVNGENTKRKGINEYINLYSQQINDKTLKKYKMSVLFKQILSDTESKSFVIDKLEDDSDVVTTMQSFYEQIAAFKTVEEKSIKETLSLLFDDLKAQKLDLSKIYFKNDKSLTDLSQQVFDDYSVIGTAVLEYITQQIAPKNLDNPSKKEQELIAKKTEKAKYLSLETIKLALEEFNKHRDIDKQCRFEEILANFAAIPMIFDEIAQNKDNLAQISIKYQNQGKKDLLQASAEDDVKAIKDLLDQTNNLLHKLKIFHISQSEDKANILDKDEHFYLVFEECYFELANIVPLYNKIRNYITQKPYSDEKFKLNFENSTLANGWDKNKEPDNTAILFIKDDKYYLGVMNKKNNKIFDDKAIKENKGEGYKKIVYKLLPGANKMLPKVFFSAKSIKFYNPSEDILRIRNHSTHTKNGSPQKGYEKFEFNIEDCRKFIDFYKQSISKHPEWKDFGFRFSDTQRYNSIDEFYREVENQGYKLTFENISESYIDSVVNQGKLYLFQIYNKDFSAYSKGRPNLHTLYWKALFDERNLQDVVYKLNGEAELFYRKQSIPKKITHPAKEAIANKNKDNPKKESVFEYDLIKDKRFTEDKFFFHCPITINFKSSGANKFNDEINLLLKEKANDVHILSIDRGERHLAYYTLVDGKGNIIKQDTFNIIGNDRMKTNYHDKLAAIEKDRDSARKDWKKINNIKEMKEGYLSQVVHEIAKLVIEYNAIVVFEDLNFGFKRGRFKVEKQVYQKLEKMLIEKLNYLVFKDNEFDKTGGVLRAYQLTAPFETFKKMGKQTGIIYYVPAGFTSKICPVTGFVNQLYPKYESVSKSQEFFSKFDKICYNLDKGYFEFSFDYKNFGDKAAKGKWTIASFGSRLINFRNSDKNHNWDTREVYPTKELEKLLKDYSIEYGHGECIKAAICGESDKKFFAKLTSVLNTILQMRNSKTGTELDYLISPVADVNGNFFDSRQAPKNMPQDADANGAYHIGLKGLMLLGRIKNNQEGKKLNLVIKNEEYFEFVQNRNN

SEQ ID NO: 5808 - protein, 1612 aa, synthetic construct; identical to SEQ ID NO: 285
  REGION 1..1612: note = Synthetic Polypeptide

What is claimed is:

1. A fusion protein comprising: (i) a Cas9 domain; (ii) a cytidine deaminase domain; and (iii) a uracil glycosylase inhibitor (UGI) domain.

2. The fusion protein of claim 1, wherein the Cas9 domain comprises an amino acid sequence that is at least 85% identical to the amino acid sequence provided in SEQ ID NO: 674.

3. The fusion protein of claim 1, wherein the Cas9 domain is a Cas9 nickase domain that cuts a nucleotide target strand of a nucleotide duplex, wherein the nucleotide target strand is the strand that binds to a gRNA of the Cas9 nickase domain.

4. The fusion protein of claim 1, wherein the Cas9 domain is an nCas9 domain that comprises a D10A mutation in the amino acid sequence provided in SEQ ID NO: 10, or a corresponding mutation in any of the amino acid sequences provided in SEQ ID NOs: 11-260.

5. The fusion protein of claim 1, wherein the Cas9 domain is an nCas9 domain that comprises one or more of N496A, R660A, Q694A, and Q926A of the amino acid sequence provided in SEQ ID NO 10, or one or more corresponding mutations in any of the amino acid sequences provided in SEQ ID NOs: 11-260.

6. The fusion protein of claim 1, wherein the cytidine deaminase domain is a deaminase from the apolipoprotein B mRNA-editing complex (APOBEC) family deaminase.

7. The fusion protein of claim 6, wherein the APOBEC family deaminase is selected from the group consisting of APOBEC1 deaminase, APOBEC2 deaminase, APOBEC3A deaminase, APOBEC3B deaminase, APOBEC3C deaminase, APOBEC3D deaminase, APOBEC3F deaminase, APOBEC3G deaminase, and APOBEC3H deaminase.

8. The fusion protein of claim 1, wherein the cytidine deaminase domain comprises an amino acid sequence that is at least 85% identical to an amino acid sequence of SEQ ID NO: 266-284, 607-610, 5724-5736, or 5738-5741.

9. The fusion protein of claim 1, wherein the cytidine deaminase domain comprises an amino acid sequence of SEQ ID NO: 266-284, 607-610, 5724-5736, or 5738-5741.

10. The fusion protein of claim 1, wherein the cytidine deaminase domain is a rat APOBEC1 (rAPOBEC1) deaminase comprising one or more mutations selected from the group consisting of W90Y, R126E, and R132E of SEQ ID NO: 284, or one or more corresponding mutations in another APOBEC deaminase.

11. The fusion protein of claim 1, wherein the cytidine deaminase domain is a human APOBEC1 (hAPOBEC1) deaminase comprising one or more mutations selected from the group consisting of W90Y, Q126E, and R132E of SEQ ID NO: 5724, or one or more corresponding mutations in another APOBEC deaminase.

12. The fusion protein of claim 1, wherein the cytidine deaminase domain is a human APOBEC3G (hAPOBEC3G) deaminase comprising one or more mutations selected from the group consisting of W285Y, R320E, and R326E of SEQ ID NO: 275, or one or more corresponding mutations in another APOBEC deaminase.

13. The fusion protein of claim 1, wherein the cytidine deaminase domain is an activation-induced deaminase (AID).

14. The fusion protein of claim 1, wherein the cytidine deaminase domain is a cytidine deaminase 1 from Petromyzon marinus (pmCDA1).

15. The fusion protein of claim 1, wherein the UGI domain comprises a domain capable if inhibiting UDG activity.

16. The fusion protein of claim 1, wherein the UGI domain comprises an amino acid sequence that is at least 85% identical to SEQ ID NO: 600.

17. The fusion protein of claim 1, wherein the UGI domain comprises an amino acid sequence as set forth in SEQ ID NO: 600.

18. The fusion protein of claim 1, wherein the fusion protein comprises the structure: NH₂-[cytidine deaminase domain]-[Cas9 domain]-[UGI domain]-COOH, and wherein each instance of “-” comprises an optional linker.

19. The fusion protein of claim 1, wherein the cytidine deaminase domain of (ii) and the nCas9 domain of (i) are linked via a linker comprising the amino acid sequence (GGGS)ₙ (SEQ ID NO: 265), (GGGGS)ₙ (SEQ ID NO: 5), (G)ₙ, (EAAAK)ₙ (SEQ ID NO: 6), (GGS)ₙ, (SGGS)ₙ(SEQ ID NO: 4288), SGSETPGTSESATPES (SEQ ID NO: 7), or (XP)ₙ motif, or a combination thereof, wherein n is independently an integer between 1 and 30, inclusive, and wherein X is any amino acid.

20. The fusion protein of claim 1, wherein the cytidine deaminase domain of (ii) and the nCas9 domain of (i) are linked via a linker comprising the amino acid sequence: SGSETPGTSESATPES (SEQ ID NO: 7).

21. The fusion protein of claim 1 further comprising a nuclear localization sequence (NLS).

22. The fusion protein of claim 21, wherein the NLS comprises the amino acid sequence PKKKRKV (SEQ ID NO: 741) or MDSLLMNRRKFLYQFKNVRWAKGRRETYLC (SEQ ID NO: 742)

23. The fusion protein of claim 21, wherein the fusion protein comprises the structure: NH₂-[cytidine deaminase domain]-[nCas9 domain]-[UGI domain]-[NLS]-COOH, and wherein each instance of “-” comprises an optional linker.

24. The fusion protein of claim 21, wherein the UGI domain and the NLS are linked via a linker comprising the amino acid sequence: SGGS (SEQ ID NO: 4288), or wherein the nCas9 domain and the UGI domain are linked via a linker comprising the amino acid sequence: SGGS (SEQ ID NO: 4288).

25. The fusion protein of claim 1, wherein the fusion protein comprises the amino acid sequence set forth in SEQ ID NO: 594.

26. A complex comprising the fusion protein of claim 1 and a guide RNA bound to the nCas9 domain of the fusion protein.

27. A method comprising contacting a nucleic acid molecule with the fusion protein of claim 1 and a guide RNA, wherein the guide RNA comprises a sequence of at least 10 contiguous nucleotides that is complementary to a target sequence in the genome of an organism and comprises a target base pair.

28. The method of claim 27, wherein the target base pair comprises a T to C point mutation associated with a disease or disorder, and wherein the deamination of the mutant C base results in a sequence that is not associated with a disease or disorder.

29. The method of claim 27, wherein the contacting results in less than 20% indel formation upon base editing.

30. The method of claim 27, wherein the contacting results in at least 2:1 intended to unintended product upon base editing.

31. A fusion protein comprising: (i) a nuclease-inactive Cas9 (dCas9) domain and (ii) an apolipoprotein B mRNA-editing complex 1 (APOBEC1) deaminase domain, wherein the deaminase domain is fused to the N-terminus of the dCas9 domain via a linker comprising the amino acid sequence SGSETPGTSESATPES (SEQ ID NO: 7).

32. The fusion protein of claim 31, wherein the nuclease-inactive Cas9 (dCas9) domain of (i) comprises the amino acid sequence that is at least 85% identical to the amino acid sequence set forth in SEQ ID NO: 263.

33. The fusion protein of claim 31, wherein the nuclease-inactive Cas9 (dCas9) domain of (i) comprises the amino acid sequence set forth in SEQ ID NO: 263.

34. The fusion protein of any one of claims 31-33, wherein the deaminase is a rat APOBEC1 deaminase that is at least 85% identical the amino acid sequence as set forth in (SEQ ID NO: 284).

35. The fusion protein of any one of claims 31-34, wherein the deaminase is rat APOBEC1 deaminase comprising the amino acid sequence as set forth in (SEQ ID NO: 284).

36. The fusion protein of any one of claims 31-33, wherein the deaminase is a human APOBEC1 deaminase that is at least 85% identical to the amino acid sequence as set forth in (SEQ ID NO: 282).

37. The fusion protein of any one of claims 31-33, wherein the deaminase is a human APOBEC1 deaminase comprising the amino acid sequence as set forth in (SEQ ID NO: 282).

38. The fusion protein of any one of claims 31-37, wherein the UGI domain comprises an amino acid sequence that is at least 80%, at least 85%, at least 90%, at least 92%, at least 95%, at least 96%, at least 97%, at least 98%, at least 99%, or at least 99.5% identical to SEQ ID NO: 600.

39. The fusion protein of any one of claims 31-38, wherein the UGI domain comprises the amino acid sequence as set forth in SEQ ID NO: 600

40. The fusion protein of any one of claims 31-37, wherein the UGI domain comprises an amino acid sequence that is at least 80%, at least 85%, at least 90%, at least 92%, at least 95%, at least 96%, at least 97%, at least 98%, at least 99%, or at least 99.5% identical to any one of SEQ ID NOs: 322-324.

41. The fusion protein of any one of claims 31-37, wherein the UGI domain comprises the amino acid sequence as set forth in any one of SEQ ID NOs: 322-324.

42. The fusion protein of any one of claims 31-41, wherein the fusion protein comprises amino acid residues 11-1629 of the amino acid sequence set forth in SEQ ID NO: 591.

43. The fusion protein of any one of claims 31-41, wherein the fusion protein comprises the amino acid sequence set forth in any one of SEQ ID NOs: 591-593, 611, 612, 615, 657, 658, and 5737.

44. A fusion protein comprising: (i) a nuclease-inactive Cas9 (dCas9) domain; (ii) a nucleic acid editing domain; and (iii) a uracil glycosylase inhibitor (UGI) domain.

45. The fusion protein of claim 44, wherein the amino acid sequence of the dCas9 domain comprises a D10X mutation of the amino acid sequence provided in SEQ ID NO: 10, or a corresponding mutation in any of the amino acid sequences provided in SEQ ID NOs: 11-260, wherein X is any amino acid except for D.

46. The fusion protein of claim 44 or 45, wherein the amino acid sequence of the dCas9 domain comprises a D10A mutation of the amino acid sequence provided in SEQ ID NO: 10, or a corresponding mutation in any of the amino acid sequences provided in SEQ ID NOs: 11-260.

47. The fusion protein of any one of claims 44-46, wherein the amino acid sequence of the dCas9 domain comprises an H840X mutation of the amino acid sequence provided in SEQ ID NO: 10, or a corresponding mutation in any of the amino acid sequences provided in SEQ ID NOs: 11-260, wherein X is any amino acid except for H.

48. The fusion protein of any one of claims 44-47, wherein the amino acid sequence of the dCas9 domain comprises an H840A mutation of the amino acid sequence provided in SEQ ID NO: 10, or a corresponding mutation in any of the amino acid sequences provided in SEQ ID NOs: 11-260.

49. The fusion protein of any one of claims 44-48, wherein the dCas9 domain comprises an amino acid sequence that is at least 85% identical to the amino acid sequence as set forth in SEQ ID NO: 263.

50. The fusion protein of any one of claims 44-49, wherein the dCas9 domain comprises the amino acid sequence as set forth in SEQ ID NO: 263.

51. The fusion protein of any one of claims 44-50, wherein the dCas9 domain comprises one or more of a N497X, R661X, Q695X, and Q926X mutation of the amino acid sequence provided in SEQ ID NO: 10, or a corresponding mutation in any of the amino acid sequences provided in SEQ ID NOs: 11-260, wherein X is any amino acid.

52. The fusion protein of any one of claims 44-51, wherein the dCas9 domain comprises one or more of a N497A, R661A, Q695A, and Q926A mutation of the amino acid sequence provided in SEQ ID NO: 10, or a corresponding mutation in any of the amino acid sequences provided in SEQ ID NOs: 11-260.

53. The fusion protein of any one of claims 44-52, wherein the dCas9 domain comprises a N497A, R661A, Q695A, and Q926A mutation of the amino acid sequence provided in SEQ ID NO: 10, or a corresponding mutation in any of the amino acid sequences provided in SEQ ID NOs: 11-260.

54. The fusion protein of any one of claims 44-53, wherein the dCas9 domain comprises a Staphylococcus aureus (SaCas9).

55. The fusion protein of claim 54, wherein the SaCas9 comprises the amino acid sequence SEQ ID NO: 4273.

56. The fusion protein of claim 54 or 55, wherein the SaCas9 domain comprises one or more of a E781K, N967K, or R1014H mutation of SEQ ID NO: 4273, or one or more corresponding mutation in any of the amino acid sequences provided in SEQ ID NOs: 11-260.

57. The fusion protein of any one of claims 44-53, wherein the dCas9 domain comprises one or more of a D1134E, R1334Q, and T1336R mutation of SEQ ID NO: 4276, or a corresponding mutation in any of the amino acid sequences provided in SEQ ID NOs: 11-260.

58. The fusion protein of any one of claims 44-53, wherein the dCas9 domain comprises one or more of a D1134V, R1334Q, and T1336R mutation of SEQ ID NO: 4276, or a corresponding mutation in any of the amino acid sequences provided in SEQ ID NOs: 11-260.

59. The fusion protein of any one of claims 44-53, wherein the dCas9 domain comprises one or more of a D1134V, G1217R, R1334Q, and T1336R mutation of SEQ ID NO: 4276, or a corresponding mutation in any of the amino acid sequences provided in SEQ ID NOs: 11-260.

60. The fusion protein of any of claims 44-59, wherein the nucleic acid editing domain is fused to the N-terminus of the dCas9 domain.

61. The fusion protein of any one of claims 44-60, wherein the UGI domain is fused to the C-terminus of the dCas9 domain.

62. The fusion protein of any one of claims 44-61, wherein the dCas9 domain and the nucleic acid editing domain are fused via a linker.

63. The fusion protein of any one of claims 44-62, wherein the dCas9 domain and the UGI domain are fused via a linker.

64. The fusion protein of claim 62 or 63, wherein the linker comprises the amino acid sequence (GGGGS)ₙ (SEQ ID NO: 5), (G)ₙ, (EAAAK)ₙ (SEQ ID NO: 6), (GGS)ₙ, SGSETPGTSESATPES (SEQ ID NO: 7), SGGS (SEQ ID NO: 4288), (XP)ₙ, or any combination thereof, wherein n is independently an integer between 1 and 30, and wherein X is any amino acid.

65. The fusion protein of claim 62 or 63, wherein the linker comprises a covalent bond.

66. The fusion protein of claim 64, wherein the linker comprises the amino acid sequence (GGS)ₙ, wherein n is 1, 3, or 7.

67. The fusion protein of claim 64, wherein the linker comprises the amino acid sequence SGSETPGTSESATPES (SEQ ID NO: 7).

68. The fusion protein of claim 62, wherein the dCas9 domain and the nucleic acid editing domain are fused via a linker comprising the amino acid sequence SGSETPGTSESATPES (SEQ ID NO: 7).

69. The fusion protein of claim 62, wherein the dCas9 domain and the nucleic acid editing domain are fused via a linker comprising the amino acid sequence (GGS)ₙ, wherein n is 1, 3, or 7.

70. The fusion protein of claim 63, wherein the dCas9 domain and the UGI domain are fused via a linker comprising the amino acid sequence (GGGGS)n (SEQ ID NO: 5), (G)n, (EAAAK)n (SEQ ID NO: 6), (GGS)n, SGSETPGTSESATPES (SEQ ID NO: 7), SGGS (SEQ ID NO: 4288), (XP)n, or any combination thereof, wherein n is independently an integer between 1 and 30, and wherein X is any amino acid.

71. The fusion protein of claim 63, wherein the dCas9 domain and the UGI domain are fused via a linker comprising the amino acid sequence SGGS (SEQ ID NO: 4288).

72. The fusion protein of any one of claims 44-71, wherein the fusion protein comprises the structure [nucleic acid editing domain]-[optional linker]-[dCas9 domain]-[optional linker]-[UGI].

73. The fusion protein of any one of claims 44-67 wherein the fusion protein comprises the structure [nucleic acid editing domain]-[optional linker]-[UGI]-[optional linker]-[dCas9]; [UGI]-[optional linker]-[nucleic acid editing domain]-[optional linker]-[dCas9]; [UGI]-[optional linker]-[dCas9]-[optional linker]-[nucleic acid editing domain]; [dCas9]-[optional linker]-[UGI]-[optional linker]-[nucleic acid editing domain]; or [dCas9]-[optional linker]-[nucleic acid editing domain]-[optional linker]-[UGI].

74. The fusion protein of any one of claims 44-73, wherein the nucleic acid editing domain comprises a deaminase.

75. The fusion protein of claim 74 wherein the deaminase is a cytidine deaminase.

76. The fusion protein of claim 74 or 75, wherein the deaminase is an apolipoprotein B mRNA-editing complex (APOBEC) family deaminase.

77. The fusion protein of any one of claims 74-76, wherein the deaminase is an APOBEC1 deaminase.

78. The fusion protein of any one of claims 74-76, wherein the deaminase is an APOBEC2 deaminase.

79. The fusion protein of any one of claims 74-76, wherein the deaminase is an APOBEC3A deaminase.

80. The fusion protein of any one of claims 74-76, wherein the deaminase is an APOBEC3B deaminase.

81. The fusion protein of any one of claims 74-76, wherein the deaminase is an APOBEC3C deaminase.

82. The fusion protein of any one of claims 74-76, wherein the deaminase is an APOBEC3D deaminase.

83. The fusion protein of any one of claims 74-76, wherein the deaminase is an APOBEC3F deaminase.

84. The fusion protein of any one of claims 74-76, wherein the deaminase is an APOBEC3G deaminase.

85. The fusion protein of any one of claims 74-76, wherein the deaminase is an APOBEC3H deaminase.

86. The fusion protein of any one of claims 74-76, wherein the deaminase is an APOBEC4 deaminase.

87. The fusion protein of claim 74 or 75, wherein the deaminase is an activation-induced deaminase (AID).

88. The fusion protein of claim 74 or 75, wherein the deaminase is an APOBEC deaminase comprising one or more mutations selected from the group consisting of H121R, H122R, R126A, R126E, R118A, W90A, W90Y, and R132E of rAPOBEC1 (SEQ ID NO: 284), or one or more corresponding mutations in another APOBEC deaminase.

89. The fusion protein of claim 74 or 75, wherein the deaminase is an APOBEC deaminase comprising a W90Y, a R126E, and a R132E mutation of rAPOBEC1 (SEQ ID NO: 284), or one or more corresponding mutations in another APOBEC deaminase.

90. The fusion protein of claim 74 or 75, wherein the deaminase comprises one or more mutations selected from the group consisting of D316R, D317R, R320A, R320E, R313A, W285A, W285Y, R326E of hAPOBEC3G (SEQ ID NO: 275), or one or more corresponding mutations in another APOBEC deaminase.

91. The fusion protein of claim 74 or 75, wherein the deaminase is an APOBEC deaminase comprising a W285Y, a R320E, and a R326E mutation of hAPOBEC3G (SEQ ID NO: 275), or one or more corresponding mutations in another APOBEC deaminase.

92. The fusion protein of any one of claims 74-91, wherein the deaminase is from a human, chimpanzee, gorilla, monkey, cow, dog, rat, or mouse.

93. The fusion protein of any one of claims 74-92, wherein the deaminase is from a human.

94. The fusion protein of any one of claims 74-92, wherein the deaminase is from a rat.

95. The fusion protein of claim 74 or 75, wherein the deaminase is an cytidine deaminase 1 from Petromyzon marinus (pmCDA1).

96. The fusion protein of any one of claims 74-76, wherein the deaminase is a rat APOBEC1 deaminase comprising the amino acid sequence set forth in (SEQ ID NO: 284).

97. The fusion protein of any one of claims 74-76, wherein the deaminase is a human APOBEC1 deaminase comprising the amino acid sequence set forth in (SEQ ID NO: 282).

98. The fusion protein of claim 95, wherein the pmCDA1 comprises an amino acid sequence set forth in (SEQ ID NO: 5738).

99. The fusion protein of claim 84, wherein the APOBEC3G is a human APOBEC3G comprising the amino acid sequence set forth in (SEQ ID NO: 275).

100. The fusion protein of claim 84, wherein the APOBEC3G is a human APOBEC3G variant comprising the amino acid sequence set forth in any one of (SEQ ID NOs: 5739-5741).

101. The fusion protein of claim 74 or 75, wherein the deaminase is at least 80%, at least 85%, at least 90%, at least 92%, at least 95%, at least 96%, at least 97%, at least 98%, at least 99%, or at least 99.5% identical to any one of the amino acid sequences set forth in SEQ ID NOs: 266-284, 607-610, 5724-5736, and 5738-5741.

102. The fusion protein of claim 74 or 75, wherein the deaminase comprises the amino acid sequence set forth in any one of SEQ ID NOs: 266-284, 607-610, 5724-5736, and 5738-5741.

103. The fusion protein of any one of claims 44-102, wherein the UGI domain comprises an amino acid sequence that is at least 80%, at least 85%, at least 90%, at least 92%, at least 95%, at least 96%, at least 97%, at least 98%, at least 99%, or at least 99.5% identical to SEQ ID NO: 600.

104. The fusion protein of any one of claims 44-103, wherein the UGI domain comprises the amino acid sequence as set forth in SEQ ID NO: 600

105. The fusion protein of any one of claims 44-102, wherein the UGI domain comprises an amino acid sequence that is at least 80%, at least 85%, at least 90%, at least 92%, at least 95%, at least 96%, at least 97%, at least 98%, at least 99%, or at least 99.5% identical to any one of SEQ ID NOs: 322-324.

106. The fusion protein of any one of claims 44-102, wherein the UGI domain comprises the amino acid sequence as set forth in any one of SEQ ID NOs: 322-324.

107. A fusion protein comprising: (i) a Cas9 nickase domain and (ii) an apolipoprotein B mRNA-editing complex 1 (APOBEC1) deaminase domain, wherein the deaminase domain is fused to the N-terminus of the Cas9 nickase domain via a linker comprising the amino acid sequence SGSETPGTSESATPES (SEQ ID NO: 7).

108. The fusion protein of claim 107, wherein the deaminase is rat APOBEC1 (SEQ ID NO: 284).

109. The fusion protein of claim 107 or 108, wherein the deaminase is human APOBEC1 (SEQ ID NO: 282).

110. A fusion protein comprising: (i) a Cas9 nickase domain and (ii) an apolipoprotein B mRNA-editing complex 3G (APOBEC3G) deaminase domain, wherein the deaminase domain is fused to the N-terminus of the Cas9 nickase domain via a linker comprising the amino acid sequence SGSETPGTSESATPES (SEQ ID NO: 7).

111. The fusion protein of claim 110, wherein the deaminase is a human APOBEC3G deaminase comprising an amino acid sequence at least 85% identical to the amino acid sequence set forth in (SEQ ID NO: 275).

112. The fusion protein of claim 110 or 111, wherein the deaminase is a human APOBEC3G (SEQ ID NO: 275).

113. The fusion protein of claim 110, wherein the APOBEC3G is a human APOBEC3G variant comprising an amino acid sequence that is at least 85% identical to the amino acid sequence as set forth in any one of (SEQ ID NOs: 5739-5741).

114. The fusion protein of claim 110, wherein the APOBEC3G is a human APOBEC3G variant comprising the amino acid sequence set forth in any one of (SEQ ID NOs: 5739-5741).

115. A fusion protein comprising: (i) a Cas9 nickase domain and (ii) pmCDA1 domain, wherein the deaminase domain is fused to the N-terminus of the Cas9 nickase domain via a linker comprising the amino acid sequence SGSETPGTSESATPES (SEQ ID NO: 7).

116. The fusion protein of claim 115, wherein the pmCDA1 comprises an amino acid sequence that is at least 85% identical to the amino acid sequence as set forth in (SEQ ID NO: 5738).

117. The fusion protein of claim 115 or 116, wherein the pmCDA1 comprises an amino acid sequence set forth in (SEQ ID NO: 5738).

118. The fusion protein of any one of claims 107-117, wherein the amino acid sequence of the Cas9 nickase domain comprises a D10X mutation of the amino acid sequence provided in SEQ ID NO: 10, or a corresponding mutation in any of the amino acid sequences provided in SEQ ID NOs: 11-260, wherein X is any amino acid except for D.

119. The fusion protein of any one of claims 107-118, wherein the amino acid sequence of the Cas9 nickase domain comprises a D10A mutation of the amino acid sequence provided in SEQ ID NO: 10, or a corresponding mutation in any of the amino acid sequences provided in SEQ ID NOs: 11-260.

120. The fusion protein of any one of claims 107-119, wherein the amino acid sequence of the Cas9 nickase domain comprises a histidine at amino acid position 840 of the amino acid sequence provided in SEQ ID NO: 10, or a corresponding amino acid position in any of the amino acid sequences provided in SEQ ID NOs: 11-260.

121. The fusion protein of any one of claims 107-120, wherein the amino acid sequence of the Cas9 nickase domain comprises the amino acid sequence that is at least 85% identical to the amino acid sequence as set forth in SEQ ID NO: 674.

122. The fusion protein of any one of claims 107-121, wherein the amino acid sequence of the Cas9 nickase domain comprises the amino acid sequence as set forth in SEQ ID NO: 674.

123. The fusion protein of any one of claims 107-122, wherein the UGI domain comprises an amino acid sequence that is at least 80%, at least 85%, at least 90%, at least 92%, at least 95%, at least 96%, at least 97%, at least 98%, at least 99%, or at least 99.5% identical to SEQ ID NO: 600.

124. The fusion protein of any one of claims 107-123, wherein the UGI domain comprises the amino acid sequence as set forth in SEQ ID NO: 600

125. The fusion protein of any one of claims 107-122, wherein the UGI domain comprises an amino acid sequence that is at least 80%, at least 85%, at least 90%, at least 92%, at least 95%, at least 96%, at least 97%, at least 98%, at least 99%, or at least 99.5% identical to any one of SEQ ID NOs: 322-324.

126. The fusion protein of any one of claims 107-122, wherein the UGI domain comprises the amino acid sequence as set forth in any one of SEQ ID NOs: 322-324.

127. The fusion protein of any one of claims 107-126, wherein the fusion protein comprises the amino acid sequence set forth in any one of SEQ ID NOs: 594, 5743, 5745, and 5746.

128. A fusion protein comprising: (i) a Cas9 nickase (nCas9) domain; (ii) a nucleic acid editing domain; and (iii) a uracil glycosylase inhibitor (UGI) domain.

129. The fusion protein of claim 128, wherein the amino acid sequence of the Cas9 nickase domain comprises a D10X mutation of the amino acid sequence provided in SEQ ID NO: 10, or a corresponding mutation in any of the amino acid sequences provided in SEQ ID NOs: 11-260, wherein X is any amino acid except for D.

130. The fusion protein of claim 128 or 129, wherein the amino acid sequence of the Cas9 nickase domain comprises a D10A mutation of the amino acid sequence provided in SEQ ID NO: 10, or a corresponding mutation in any of the amino acid sequences provided in SEQ ID NOs: 11-260.

131. The fusion protein of any one of claims 128-130, wherein the amino acid sequence of the Cas9 nickase domain comprises a histidine at amino acid position 840 of the amino acid sequence provided in SEQ ID NO: 10, or a corresponding amino acid position in any of the amino acid sequences provided in SEQ ID NOs: 11-260.

132. The fusion protein of any one of claims 128-131, wherein the amino acid sequence of the Cas9 nickase domain comprises an amino acid sequence that is at least 85% identical to the amino acid sequence as set forth in SEQ ID NO: 674.

133. The fusion protein of any one of claims 128-131, wherein the amino acid sequence of the Cas9 nickase domain comprises the amino acid sequence as set forth in SEQ ID NO: 674.

134. The fusion protein of any one of claims 128-133, wherein the Cas9 nickase domain comprises one or more of a N497X, R661X, Q695X, and Q926X mutation of the amino acid sequence provided in SEQ ID NO: 10, or a corresponding mutation in any of the amino acid sequences provided in SEQ ID NOs: 11-260, wherein X is any amino acid.

135. The fusion protein of any one of claims 128-134, wherein the Cas9 nickase domain comprises one or more of a N497A, R661A, Q695A, and Q926A mutation of the amino acid sequence provided in SEQ ID NO: 10, or a corresponding mutation in any of the amino acid sequences provided in SEQ ID NOs: 11-260.

136. The fusion protein of any one of claims 128-135, wherein the Cas9 nickase domain comprises a N497A, R661A, Q695A, and Q926A mutation of the amino acid sequence provided in SEQ ID NO: 10, or a corresponding mutation in any of the amino acid sequences provided in SEQ ID NOs: 11-260.

137. The fusion protein of any one of claims 128-136, wherein the Cas9 nickase domain comprises a Staphylococcus aureus (SaCas9).

138. The fusion protein of claim 137, wherein the SaCas9 comprises the amino acid sequence SEQ ID NO: 4273.

139. The fusion protein of claim 137 or 138, wherein the SaCas9 comprises one or more of a E781K, N967K, or R1014H mutation of SEQ ID NO: 4273, or one or more corresponding mutation in any of the amino acid sequences provided in SEQ ID NOs: 11-260.

140. The fusion protein of any one of claims 128-136, wherein the dCas9 domain comprises one or more of a D1134E, R1334Q, and T1336R mutation of SEQ ID NO: 4276, or a corresponding mutation in any of the amino acid sequences provided in SEQ ID NOs: 11-260.

141. The fusion protein of any one of claims 128-136, wherein the dCas9 domain comprises one or more of a D1134V, R1334Q, and T1336R mutation of SEQ ID NO: 4276, or a corresponding mutation in any of the amino acid sequences provided in SEQ ID NOs: 11-260.

142. The fusion protein of any one of claims 128-136, wherein the dCas9 domain comprises one or more of a D1134V, G1217R, R1334Q, and T1336R mutation of SEQ ID NO: 4276, or a corresponding mutation in any of the amino acid sequences provided in SEQ ID NOs: 11-260.

143. The fusion protein of any of claims 128-142, wherein the nucleic acid editing domain is fused to the N-terminus of the Cas9 nickase domain.

144. The fusion protein of any one of claims 128-143, wherein the UGI domain is fused to the C-terminus of the Cas9 nickase domain.

145. The fusion protein of any one of claims 128-144, wherein the Cas9 nickase domain and the nucleic acid editing domain are fused via a linker.

146. The fusion protein of any one of claims 128-145, wherein the Cas9 nickase domain and the UGI domain are fused via a linker.

147. The fusion protein of claims 145 or 146, wherein the linker comprises the amino acid sequence (GGGGS)n (SEQ ID NO: 5), (G)n, (EAAAK)n (SEQ ID NO: 6), (GGS)n, SGSETPGTSESATPES (SEQ ID NO: 7), SGGS (SEQ ID NO: 4288), (XP)n, or any combination thereof, wherein n is independently an integer between 1 and 30, and wherein X is any amino acid.

148. The fusion protein of claim 145 or 146, wherein the linker comprises a covalent bond.

149. The fusion protein of claim 147, wherein the linker comprises the amino acid sequence (GGS)n, wherein n is 1, 3, or 7.

150. The fusion protein of claim 147, wherein the linker comprises the amino acid sequence SGSETPGTSESATPES (SEQ ID NO: 7).

151. The fusion protein of claim 145, wherein the nCas9 domain and the nucleic acid editing domain are fused via a linker comprising the amino acid sequence SGSETPGTSESATPES (SEQ ID NO: 7).

152. The fusion protein of claim 145, wherein the nCas9 domain and the nucleic acid editing domain are fused via a linker comprising the amino acid sequence (GGS)n, wherein n is 1, 3, or 7.

153. The fusion protein of claim 146, wherein the nCas9 domain and the UGI domain are fused via a linker comprising the amino acid sequence (GGGGS)n (SEQ ID NO: 5), (G)n, (EAAAK)n (SEQ ID NO: 6), (GGS)n, SGSETPGTSESATPES (SEQ ID NO: 7), SGGS (SEQ ID NO: 4288), (XP)n, or any combination thereof, wherein n is independently an integer between 1 and 30, and wherein X is any amino acid.

154. The fusion protein of claim 146, wherein the nCas9 domain and the UGI domain are fused via a linker comprising the amino acid sequence SGGS (SEQ ID NO: 4288).

155. The fusion protein of any one of claims 128-154 wherein the fusion protein comprises the structure [nucleic acid editing domain]-[optional linker]-[Cas9 nickase]-[optional linker]-[UGI domain].

156. The fusion protein of any one of claims 128-154 wherein the fusion protein comprises the structure [nucleic acid editing domain]-[optional linker]-[UGI domain]-[optional linker]-[Cas9 nickase]; [UGI domain]-[optional linker]-[nucleic acid editing domain]-[optional linker]-[Cas9 nickase]; [UGI domain]-[optional linker]-[Cas9 nickase]-[optional linker]-[nucleic acid editing domain]; [Cas9 nickase]-[optional linker]-[UGI domain]-[optional linker]-[nucleic acid editing domain]; or [Cas9 nickase]-[optional linker]-[nucleic acid editing domain]-[optional linker]-[UGI domain].

157. The fusion protein of any one of claims 128-156, wherein the nucleic acid editing domain comprises a deaminase.

158. The fusion protein of claim 157 wherein the deaminase is a cytidine deaminase.

159. The fusion protein of claim 157 or 158, wherein the deaminase is an apolipoprotein B mRNA-editing complex (APOBEC) family deaminase.

160. The fusion protein of any one of claims 157-159, wherein the deaminase is an APOBEC1 deaminase.

161. The fusion protein of any one of claims 157-159, wherein the deaminase is an APOBEC2 deaminase.

162. The fusion protein of any one of claims 157-159, wherein the deaminase is an APOBEC3A deaminase.

163. The fusion protein of any one of claims 157-159, wherein the deaminase is an APOBEC3B deaminase.

164. The fusion protein of any one of claims 157-159, wherein the deaminase is an APOBEC3C deaminase.

165. The fusion protein of any one of claims 157-159, wherein the deaminase is an APOBEC3D deaminase.

166. The fusion protein of any one of claims 157-159, wherein the deaminase is an APOBEC3F deaminase.

167. The fusion protein of any one of claims 157-159, wherein the deaminase is an APOBEC3G deaminase.

168. The fusion protein of any one of claims 157-159, wherein the deaminase is an APOBEC3H deaminase.

169. The fusion protein of any one of claims 157-159, wherein the deaminase is an APOBEC4 deaminase.

170. The fusion protein of claim 157 or 158, wherein the deaminase is an activation-induced deaminase (AID).

171. The fusion protein of claim 157 or 158, wherein the deaminase is an APOBEC deaminase comprising one or more mutations selected from the group consisting of H121R, H122R, R126A, R126E, R118A, W90A, W90Y, and R132E of rAPOBEC1 (SEQ ID NO: 284), or one or more corresponding mutations in another APOBEC deaminase.

172. The fusion protein of claim 157 or 158, wherein the deaminase is an APOBEC deaminase comprising a W90Y, a R126E, and a R132E mutation of rAPOBEC1 (SEQ ID NO: 284), or one or more corresponding mutations in another APOBEC deaminase.

173. The fusion protein of claim 157 or 158, wherein the deaminase comprises one or more mutations selected from the group consisting of D316R, D317R, R320A, R320E, R313A, W285A, W285Y, R326E of hAPOBEC3G (SEQ ID NO: 275), or one or more corresponding mutations in another APOBEC deaminase.

174. The fusion protein of claim 157 or 158, wherein the deaminase is an APOBEC deaminase comprising a W285Y, a R320E, and a R326E mutation of hAPOBEC3G (SEQ ID NO: 275), or one or more corresponding mutations in another APOBEC deaminase.

175. The fusion protein of any one of claims 157-174, wherein the deaminase is from a human, chimpanzee, gorilla, monkey, cow, dog, rat, or mouse.

176. The fusion protein of any one of claims 157-175, wherein the deaminase is from a human.

177. The fusion protein of any one of claims 157-175, wherein the deaminase is from a rat.

178. The fusion protein of claim 157 or 158, wherein the deaminase is an cytidine deaminase 1 from Petromyzon marinus (pmCDA1).

179. The fusion protein of any one of claims 157-159, wherein the deaminase is a rat APOBEC1 deaminase comprising the amino acid sequence set forth in (SEQ ID NO: 284).

180. The fusion protein of any one of claims 157-159, wherein the deaminase is a human APOBEC1 deaminase comprising the amino acid sequence set forth in (SEQ ID NO: 282).

181. The fusion protein of claim 178, wherein the pmCDA1 comprises an amino acid sequence set forth in (SEQ ID NO: 5738).

182. The fusion protein of claim 167, wherein the APOBEC3G is a human APOBEC3G comprising the amino acid sequence set forth in (SEQ ID NO: 275).

183. The fusion protein of claim 167, wherein the APOBEC3G is a human APOBEC3G variant comprising the amino acid sequence set forth in any one of (SEQ ID NO: 5739-5741).

184. The fusion protein of claim 157 or 158, wherein the deaminase is at least 80%, at least 85%, at least 90%, at least 92%, at least 95%, at least 96%, at least 97%, at least 98%, at least 99%, or at least 99.5% identical to any one of the amino acid sequences set forth in SEQ ID NOs: 266-284, 607-610, 5724-5736 and 5738-5741.

185. The fusion protein of claim 157 or 158, wherein the deaminase comprises the amino acid sequence set forth in any one of SEQ ID NOs: 266-284, 607-610, 5724-5736 and 5738-5741.

186. The fusion protein of any one of claims 128-185, wherein the UGI domain comprises an amino acid sequence that is at least 80%, at least 85%, at least 90%, at least 92%, at least 95%, at least 96%, at least 97%, at least 98%, at least 99%, or at least 99.5% identical to SEQ ID NO: 600.

187. The fusion protein of any one of claims 128-186, wherein the UGI domain comprises the amino acid sequence as set forth in SEQ ID NO: 600.

188. The fusion protein of any one of claims 128-185, wherein the UGI domain comprises an amino acid sequence that is at least 80%, at least 85%, at least 90%, at least 92%, at least 95%, at least 96%, at least 97%, at least 98%, at least 99%, or at least 99.5% identical to any one of SEQ ID NOs: 322-324.

189. The fusion protein of any one of claims 128-185, wherein the UGI domain comprises the amino acid sequence as set forth in any one of SEQ ID NOs: 322-324.

190. A complex comprising the fusion protein of anyone of claims 1-30, and a guide RNA (gRNA) bound to the Cas9 domain of the fusion protein.

191. A complex comprising the fusion protein of any one of claims 31-106, and a guide RNA (gRNA) bound to the dCas9 domain of the fusion protein.

192. A complex comprising the fusion protein of any one of claims 107-189 and a guide RNA (gRNA) bound to the Cas9 nickase (nCas9) domain of the fusion protein.

193. The complex of any one of claims 190-192, wherein the guide RNA is from 15-100 nucleotides long and comprises a sequence of at least 10 contiguous nucleotides that is complementary to a target sequence.

194. The complex of claim 193, wherein the guide RNA is 15, 16, 17, 18, 19, 20, 21, 22, 23, 24, 25, 26, 27, 28, 29, 30, 31, 32, 33, 34, 35, 36, 37, 38, 39, 40, 41, 42, 43, 44, 45, 46, 47, 48, 49, or 50 nucleotides long.

195. The complex of any one of claims 190-194, wherein the guide RNA comprises a sequence of 15, 16, 17, 18, 19, 20, 21, 22, 23, 24, 25, 26, 27, 28, 29, 30, 31, 32, 33, 34, 35, 36, 37, 38, 39, or 40 contiguous nucleotides that is complementary to a target sequence.

196. The complex of any one of claims 190-195, wherein the target sequence is a DNA sequence.

197. The complex of claim 196, wherein the target sequence is in the genome of an organism.

198. The complex of claim 197, wherein the organism is a prokaryote.

199. The complex of claim 198, wherein the prokaryote is bacteria.

200. The complex of claim 197, wherein the organism is a eukaryote.

201. The complex of claim 200, wherein the organism is a plant.

202. The complex of claim 200, wherein the organism is a vertebrate.

203. The complex of claim 202, wherein the vertebrate is a mammal.

204. The complex of claim 203, wherein the mammal is a mouse or rat.

205. The complex of claim 203, wherein the mammal is human.

206. A method comprising contacting a nucleic acid molecule with the fusion protein of any one of claims 1-189 and a guide RNA, wherein the guide RNA is from 15-100 nucleotides long and comprises a sequence of at least 10 contiguous nucleotides that is complementary to a target sequence.

207. A method comprising contacting a nucleic acid molecule with the complex of any one of claims 190-205.

208. The method of claim 206 or 207, wherein the nucleic acid is DNA.

209. The method of claim 208, wherein the nucleic acid is double-stranded DNA.

210. The method of any one of claims 206-209, wherein the target sequence comprises a sequence associated with a disease or disorder.

211. The method of claim 210, wherein the target sequence comprises a point mutation associated with a disease or disorder.

212. The method of claim 211, wherein the activity of the fusion protein, or the complex results in a correction of the point mutation.

213. The method of any one of claims 206-212, wherein the target sequence comprises a T to C point mutation associated with a disease or disorder, and wherein the deamination of the mutant C base results in a sequence that is not associated with a disease or disorder.

214. The method of claim 213, wherein the target sequence encodes a protein, and wherein the point mutation is in a codon and results in a change in the amino acid encoded by the mutant codon as compared to a wild-type codon.

215. The method of claim 214, wherein the deamination of the mutant C results in a change of the amino acid encoded by the mutant codon.

216. The method of claim 215, wherein the deamination of the mutant C results in the codon encoding a wild-type amino acid.

217. The method of any one of claims 206-216, wherein the contacting is performed in vivo in a subject.

218. The method of any one of claims 206-216, wherein the contacting is performed in vitro.

219. The method of claim 217, wherein the subject has been diagnosed with a disease or disorder.

220. The method of any one of claims 210-219, wherein the disease or disorder is cystic fibrosis, phenylketonuria, epidermolytic hyperkeratosis (EHK), Charcot-Marie-Toot disease type 4J, neuroblastoma (NB), von Willebrand disease (vWD), myotonia congenital, hereditary renal amyloidosis, dilated cardiomyopathy (DCM), hereditary lymphedema, familial Alzheimer's disease, HIV, Prion disease, chronic infantile neurologic cutaneous articular syndrome (CINCA), desmin-related myopathy (DRM), a neoplastic disease associated with a mutant PI3KCA protein, a mutant CTNNB1 protein, a mutant HRAS protein, or a mutant p53 protein.

221. The method of any one of claims 211-220, wherein the disease or disorder is associated with a T>C or A>G mutation in a gene selected from the genes disclosed in Table 1.

222. The method of any one of claims 211-220, wherein the disease or disorder is associated with a T>C or A>G mutation in a gene selected from the genes disclosed in Table 2 or 3.

223. The method of any one of claims 206-222, wherein the guide RNA comprises a nucleotide sequence of any one of the protospacer sequences in Table 2 or Table 3.

224. A method for editing a nucleobase pair of a double-stranded DNA sequence, the method comprising:
a. contacting a target region of the double-stranded DNA sequence with a complex comprising a nucleobase editor and a guide nucleic acid, wherein the target region comprises a target nucleobase pair;
b. inducing strand separation of said target region;
c. converting a first nucleobase of said target nucleobase pair in a single strand of the target region to a second nucleobase; and
d. cutting no more than one strand of said target region;
wherein a third nucleobase complementary to the first nucleobase base is replaced by a fourth nucleobase complementary to the second nucleobase and the method causes less than 20% indel formation in the double-stranded DNA sequence.

225. The method of claim 224, wherein the method causes less than 20%, 19%, 18%, 16%, 14%, 12%, 10%, 8%, 6%, 4%, 2%, or 1% indel formation.

226. The method of claim 224 or 225, further comprising replacing the second nucleobase with a fifth nucleobase that is complementary to the fourth nucleobase, thereby generating an intended edited basepair.

227. The method of any one of claims 224-226, wherein the efficiency of generating the intended edited basepair is at least 5%.

228. The method of claim 227, wherein the efficiency is at least 10%, 15%, 20%, 25%, 30%, 35%, 40%, 45%, or 50%.

229. The method of claim 226, wherein the ratio of intended products to unintended products at the target nucleotide is at least 2:1, 5:1, 10:1, 20:1, 30:1, 40:1, 50:1, 60:1, 70:1, 80:1, 90:1, 100:1, or 200:1.

230. The method of claim 226, wherein the ratio of intended point mutation to indel formation is greater than 1:1, 10:1, 50:1, 100:1, 500:1, or 1000:1.

231. The method of any one of claims 224-230, wherein the cut single strand is hybridized to the guide nucleic acid.

232. The method of any one of claims 224-231, wherein the cut single strand is opposite to the strand comprising the first nucleobase.

233. The method of any one of claims 224-232, wherein said first base is cytosine.

234. The method of any one of claims 224-233, wherein the second nucleobase is not a G, C, A, or T.

235. The method of any one of claims 224-234, wherein said second base is uracil.

236. The method of any one of claims 224-235, wherein the nucleobase editor comprises UGI activity.

237. The method of any one of claims 224-236, wherein the nucleobase editor comprises nickase activity.

238. The method of any one of claims 226-237, wherein the intended edited basepair is upstream of a PAM site.

239. The method of claim 238, wherein the intended edited base pair is 1, 2, 3, 4, 5, 6, 7, 8, 9, 10, 11, 12, 13, 14, 15, 16, 17, 18, 19, or 20 nucleotides upstream of the PAM site.

240. The method of claim 239, wherein the intended edited basepair is downstream of a PAM site.

241. The method of claim 240, wherein the intended edited base pair is 1, 2, 3, 4, 5, 6, 7, 8, 9, 10, 11, 12, 13, 14, 15, 16, 17, 18, 19, or 20 nucleotides downstream stream of the PAM site.

242. The method of any one of claims 224-241, wherein the method does not require a canonical PAM site.

243. The method of claim 242, wherein the canonical PAM sit comprises NGG, wherein N is A, T, C, or G.

244. The method of any one of claims 224-243, wherein the nucleobase editor comprises a linker.

245. The method of claim 244, wherein the linker is 1-25 amino acids in length.

246. The method of claim 244 or 245, wherein the linker is 5-20 amino acids in length.

247. The method of any one of claims 244-246, wherein the linker is 10, 11, 12, 13, 14, 15, 16, 17, 18, 19, or 20 amino acids in length.

248. The method of any one of claims 224-247, wherein the target region comprises a target window, wherein the target window comprises the target nucleobase pair.

249. The method of claim 248, wherein the target window comprises 1-10 nucleotides.

250. The method of claim 248, wherein the target window is 1-9, 1-8, 1-7, 1-6, 1-5, 1-4, 1-3, 1-2, or 1 nucleotides in length.

251. The method of claim 248, wherein the target window is 1, 2, 3, 4, 5, 6, 7, 8, 9, 10, 11, 12, 13, 14, 15, 16, 17, 18, 19, or 20 nucleotides in length.

252. The method of claim any one of claims 224-251, wherein the intended edited base pair occurs within the target window.

253. The method of claim any one of claims 224-252, wherein the target window comprises the intended edited base pair.

254. The method of any one of claims 224-253, wherein the nucleobase editor comprises any one of the fusion proteins of claims 1-189

255. A method for editing a nucleobase pair of a double-stranded DNA sequence, the method comprising:
a. contacting a target region of the double-stranded DNA sequence with a complex comprising a nucleobase editor and a guide nucleic acid, wherein the target region comprises a target nucleobase pair;
b. inducing strand separation of said target region;
c. converting a first nucleobase of said target nucleobase pair in a single strand of the target region to a second nucleobase;
d. cutting no more than one strand of said target region;
wherein a third nucleobase complementary to the first nucleobase base is replaced by a fourth nucleobase complementary to the second nucleobase; and
e. replacing the second nucleobase with a fifth nucleobase that is complementary to the fourth nucleobase, thereby generating an intended edited basepair,
wherein the efficiency of generating the intended edited basepair is at least 5%.

256. The method of claim 255, wherein the efficiency is at least 5%, 10%, 15%, 20%, 25%, 30%, 35%, 40%, 45%, or 50%.

257. The method of claim 255 or 256, wherein the method causes less than 19%, 18%, 16%, 14%, 12%, 10%, 8%, 6%, 4%, 2%, or 1% indel formation.

258. The method of any one of claims 255-257, wherein the ratio of intended product to unintended products at the target nucleotide is at least 2:1, 5:1, 10:1, 20:1, 30:1, 40:1, 50:1, 60:1, 70:1, 80:1, 90:1, 100:1, or 200:1.

259. The method of any one of claims 255-258, wherein the ratio of intended point mutation to indel formation is greater than 1:1, 10:1, 50:1, 100:1, 500:1, or 1000:1.

260. The method of any one of claims 255-259, wherein the cut single strand is hybridized to the guide nucleic acid.

261. The method of claim any one of claims 255-260, wherein the cut single strand is opposite to the strand comprising the first nucleobase.

262. The method of any one of claims 255-261, wherein said first base is cytosine.

263. The method of any one of claims 255-262, wherein the second nucleobase is not G, C, A, or T.

264. The method of any one of claims 255-263, wherein said second base is uracil.

265. The method of any one of claims 255-264, wherein the nucleobase editor comprises UGI activity.

266. The method of any one of claims 255-265, wherein the nucleobase edit comprises nickase activity.

267. The method of any one of claims 255-266, wherein the intended edited basepair is upstream of a PAM site.

268. The method of claim 267, wherein the intended edited base pair is 1, 2, 3, 4, 5, 6, 7, 8, 9, 10, 11, 12, 13, 14, 15, 16, 17, 18, 19, or 20 nucleotides upstream of the PAM site.

269. The method of any one of claims 255-266, wherein the intended edited basepair is downstream of a PAM site.

270. The method of claim 269, wherein the intended edited base pair is 1, 2, 3, 4, 5, 6, 7, 8, 9, 10, 11, 12, 13, 14, 15, 16, 17, 18, 19, or 20 nucleotides downstream stream of the PAM site.

271. The method of any one of claims 255-270, wherein the method does not require a canonical PAM site.

272. The method of claim 271, wherein the canonical PAM site comprises NGG, wherein N is A, T, C, or G.

273. The method of any one of claims 255-272, wherein the nucleobase editor comprises a linker.

274. The method of claim 273, wherein the linker is 1-25 amino acids in length.

275. The method of claim 274 or 275, wherein the linker is 5-20 amino acids in length.

276. The method of any one of claims 274-275, wherein the linker is 10, 11, 12, 13, 14, 15, 16, 17, 18, 19, or 20 amino acids in length.

277. The method of any one of claims 274-27, wherein the target region comprises a target window, wherein the target window comprises the target nucleobase pair.

278. The method of claim 277 wherein the target window comprises 1-10 nucleotides.

279. The method of claim 277, wherein the target window is 1-9, 1-8, 1-7, 1-6, 1-5, 1-4, 1-3, 1-2, or 1 nucleotides in length.

280. The method of claim 277, wherein the target window is 1, 2, 3, 4, 5, 6, 7, 8, 9, 10, 11, 12, 13, 14, 15, 16, 17, 18, 19, or 20 nucleotides in length.

281. The method of any one of claims 277-280, wherein the intended edited base pair occurs within the target window.

282. The method of any one of claims 277-281, wherein the target window comprises the intended edited base pair.

283. The method of any one of claims 255-282, wherein the nucleobase editor comprises any one of the fusion proteins of claims 1-189

284. A nucleic acid-guided deaminase coupled to an inhibitor of base excision repair.

285. The nucleic acid-guided deaminase of claim 284 comprising an initiator of mismatch repair.

286. The nucleic acid-guided deaminase of claim 284 comprising a nickase.

287. A method for editing a nucleobase pair of a double-stranded DNA sequence, the method comprising:
a. contacting a target region of the double-stranded DNA sequence with a nucleic acid-guided deaminase, wherein the target region comprises a target nucleobase pair;
b. converting a first nucleobase of said target nucleobase pair of the target region to a second nucleobase; and
c. inhibiting base excision repair of the second nucleobase.

288. The method of claim 287 further comprising nicking the non-edited strand of the target double-stranded DNA sequence.

289. The method of claim 287 further comprising initiating mismatch repair to convert the nucleobase complementary to the first nucleobase on the non-edited strand to a nucleobase complementary to the second nucleobase.

290. The method of claim 287 further comprising inducing strand separation in the target region.

291. A method for editing a nucleobase pair of a double-stranded DNA sequence, the method comprising:
a. contacting a target region of the double-stranded DNA sequence with a nucleic acid-guided deaminase, wherein the target region comprises a target nucleobase pair;
b. converting a first nucleobase of said target nucleobase pair in the target region to a second nucleobase; and
c. initiating mismatch repair to convert the nucleobase complementary to the first nucleobase on the non-edited strand to a nucleobase complementary to the second nucleobase.

292. The method of claim 291 further comprising inhibiting base excision repair of the second nucleobase.

293. The method of claim 291 further comprising inducing strand separation in the target region.

294. The method of claim 287 or 291, wherein the nucleic acid-guided deaminase is a nucleic acid-guided cytidine deaminase.

295. A kit comprising a nucleic acid construct, comprising
(a) a nucleic acid sequence encoding the fusion protein of any one of claims 1-189; and
(b) a heterologous promoter that drives expression of the sequence of (a).

296. The kit of claim 256, further comprising an expression construct encoding a guide RNA backbone, wherein the construct comprises a cloning site positioned to allow the cloning of a nucleic acid sequence identical or complementary to a target sequence into the guide RNA backbone.

297. A polynucleotide encoding the fusion protein of any one of claims 1-189.

298. A vector comprising a polynucleotide of claim 258.

299. The vector of claim 259, wherein the vector comprises a heterologous promoter driving expression of the polynucleotide.

300. A cell comprising the fusion protein of any one of claims 1-189.

301. A cell comprising the complex of any of claims 190-205.

302. A cell comprising the nucleic acid molecule encoding the fusion protein of any one of claims 1-189.
